(19) United States
(12) Patent Application Publication
(10) Pub. No.: US 2003/0135888 A1
(43) Pub. Date: Jul. 17, 2003

(54) Genes that are modulated by posttranscriptional gene silencing

(76) Inventors: Tong Zhu, San Diego, CA (US); Xun Wang, San Diego, CA (US); Hur-Song Chang, San Diego, CA (US); Steven P. Briggs, Del Mar, CA (US); Bret Cooper, La Jolla, CA (US); Jane Glazebrook, San Diego, CA (US); Stephen A. Goff, Encinitas, CA (US); Fumiaki Katagiri, San Diego, CA (US); Joel Kreps, Carlsbad, CA (US); Todd Moughamer, San Diego, CA (US); Nicholas Provart, Toronto (CA); Darrell Ricke, San Diego, CA (US)

Correspondence Address: TORREY MESA RESEARCH INSTITUTE, INTELLECTUAL PROPERTY DEPARTMENT, 3115 MERRYFIELD ROW, SAN DIEGO, CA, 92121, US

(21) Appl. No.: 10/259,165

(22) Filed: Sep. 26, 2002

Related U.S. Application Data
(60) Provisional application No. 60/368,327, filed on Mar. 27, 2002.
(60) Provisional application No. 60/325,277, filed on Sep. 26, 2001.
(60) Provisional application No. 60/370,620, filed on Apr. 4, 2002.

(51) Int. Cl. A01H 5/00; C07H 21/04; C12N 15/82; C12N 5/04

(52) U.S. Cl. 800/288; 536/23.2; 435/419; 800/320; 800/306; 800/320.1; 800/320.2; 800/320.3; 435/320.1

(57) ABSTRACT

The invention provides a method to identify genes that are modulated by posttranscriptional gene silencing as well as regulatory elements and methods to modulate gene expression by posttranscriptional gene silencing.

### CROSS-REFERENCE TO RELATED APPLICATIONS

[0001] This application claims the benefit of U.S. Provisional Application No. 60/368,327, filed Mar. 27, 2002, U.S. Provisional Application No. 60/325,277 filed Sep. 26, 2001, and U.S. Provisional Application No. 60/370,620 filed Apr. 4, 2002, each of which is incorporated herein by reference in its entirety.

### REFERENCE TO MATERIAL SUBMITTED ON COMPACT DISC

[0002] The sequence listing accompanying this application is contained on compact disc. The material on the CD-ROM (filed in duplicate herewith), on CD volume labled “Copy 1”and “Copy 2”, each containing a text file named “70030NP, SEQ, LST” created Sep. 26, 2002, having a size of 1.36 MB, is hereby incorporated by reference in its entirety pursuant to 37 C.F.R. §1.52(e)(5).

### FIELD OF THE INVENTION

[0003] The present invention generally relates to the field of plant molecular biology, and more specifically to the regulation of gene expression within a cell by posttranscriptional gene silencing.

### BACKGROUND OF THE INVENTION

[0004] Plant gene silencing was originally thought to be a quirk of transformation procedures, but is now recognized to be a facet of vitally important gene regulatory systems present in all organisms. Posttranscriptional gene silencing (PTGS) refers to the trans-activation of homologous genes due to increased RNA degradation. This is a stable, reversible epigenetic modification due to increased RNA degradation triggered by sequence-specific signals that, in some cases, can spread systemically. Although first described in transgenic plants, it is now recognized that very similar forms of PTGS occur in a wide variety of organisms.

[0005] Posttranscriptional gene silencing (PTGS) in plants is analogous to RNA interference (RNAi), first identified in C. elegans, but now known to function in several other animals, including insects, vertebrates and cnidarian. The few existing reports of PTGS in monocots suggest that it probably operates through mechanisms similar to those observed in dicots since shared features include the existence and triggering of coding region methylation (Ingelbrecht et al., Proc. Natl. Acad. Sci. USA, 90:10502 (1994) and Ingelbrecht et al., Plant Physiol., 119:1187 (1999)), mitotic stability (Guo et al., Mol. Plant-Microbe Interact., 12:103 (1999) and Ingelbrecht et al., Plant Physiol., 119:1187 (1999)), the induction of virus recovery in transgenic plants (Ingelbrecht et al., Plant Physiol., 119:1187 (1999) and Pinto et al., Nature Biotechnol., 17:702 (1999)), and the ability to cosuppress endogenous genes (Yin et al., EMBO J., 16:5247 (1997)). Many of the host genes that are responsible for PTGS-like processes in C. elegans (RNAi) and Neurospora (quelling) are conserved in plants, suggesting that features of PTGS are common between widely diverged groups of eukarya (Cogoni et al., Nature, 399:166 (1999); Cogoni et al., Science, 286:2342 (1999); Ketting et al., Cell, 90:133 (1999); Tabara et al., Cell, 99:123 (1999)).

[0006] Although there are reports of PTGS induction with single-copy inserts, the presence of inverted repeats and multiple copies of transgenes are typically associated with silencing (Jorgensen et al., Plant Mol. Biol., 31:957 (1996)). In general, PTGS is correlated with active transcription of the transgene, and transcriptional silencing of the transgene has been shown to reverse PTGS (English et al., Plant J., 12:597 (1997) and Que et al., Dev. Genet., 22:100 (1998)).

[0007] It is believed that either ectopic DNA-DNA or DNA-RNA pairing, or the formation (intended or unintended) of antisense transcripts that give rise to dsRNA from cryptic promoters 3′ to the transgene insert, results in the formation of aberrant RNA transcripts (which include RNAs lacking polyadenylation, or short polyadenylated RNAs, generated as a result of incomplete transcription) that activate silencing (Baulcombe et al. Curr. Opin. Biotechnol., 7:173 (1996); Depicker et al., Curr. Opin. Cell Biol., 9:373 (1997); Metzlaff et al., Cell, 88:845 (1997); Montgomery et al., Trends Genet., 14:255 (1998); Que et al., Dev. Genet., 22:100 (1998); Stam et al., Mol. Cell Biol., 18:6165 (1998); and Wassenegger et al., Plant Mol. Biol., 37:349 (1998)). High levels of transcription, giving rise to accumulation of normal transcripts that exceeds a ‘threshold’ level, have been proposed to activate silencing (Lindbo et al., Plant Cell, 5:1749 (1993)). Additionally, small RNAs have been shown to trigger PTGS in Drosophila preparations (Elbashir et al., Genes Devel., 15:188 (2001)). Thus, normal transcripts, antisense transcripts and aberrant transcripts can all give rise to PTGS.

[0008] Upon the entry of PTGS-eliciting RNA into the cytoplasm, its degradation and that of any homologous RNAs is postulated to ensue and several reports have shown the presence of either degradation intermediates or aberrant transcripts (Goodwin et al., Plant Cell, 8:95 (1996) and van Eldik et al., Nucl. Acids Res., 26:5176 (1998)). A critical question is how these RNAs are distinguished from normal cellular RNAs and targeted for elimination. A possibility is that host RNA-dependent RNA polymerase (RdRP) and RNase functions are active during these surveillance events. The dsRNA formed through RdRP activity presumably serves as a target for RNase, providing the basis for sequence specificity of degradation. Small (25 nt) fragments of antisense orientation to the elicitor RNA have been observed in all studied cases of PTGS in plants (Hamilton et al., Science, 286:950 (1999)), but it is still not certain if host RdRP is involved in their synthesis.

[0009] Formation of complementary RNA by RdRP activity appears to be followed by the degradation of dsRNAs by an RNase which may be constitutive or specific to PTGS (Lindbo et al., Plant Cell, 5:1749 (1993); D. Baulcombe, Plant Mol. Biol., 32:79 (1996)).

[0010] Mutants that increase or decrease the severity of PTGS have been isolated in Arabidopsis and PTGS-related genes have been cloned (Elmayan et al., Plant Cell, 10:1747 (1998); Morel et al., Plant Mol. Biol., 43:275 (2000); Dalmay et al., Cell, 101:543 (2000); Fagard et al., Proc. Natl. Acad. Sci. USA, 97:11650 (2000); Mourrain et al., Cell, 101:533 (2000)) and some viral proteins have been shown to be capable of reversing PTGS (Anandalakshmi et al., Proc. Natl. Acad. Sci. USA, 95:13079 (1998); Beclin et al., Virology, 252:313 (1998); Brigneti et al., EMBO J., 17:6739 (1998); Kasschau et al., Cell, 95:461 (1998); Marathe et al., Plant Mol. Biol., 2000). Both DNA and RNA viruses, and viruses that affect monocots and dicots have been shown to possess these proteins.

[0011] Gene silencing has been shown to occur in instances where there has been an insertion of a single copy of a gene. This situation is of great concern as it may cause a reduction in the production of a desired gene product. Presently there is little insight into how or why such sequences are targeted, although it is clear that in many instances excessive expression levels lead to PTGS. Also, little insight exists into the stochastic processes that lead to silencing in some lines while sibling progeny with an apparently identical genomic complement and organization express transgenic information reliably and at high levels.

[0012] Stability of expression is vital for future increases in performance of major crops, especially the grasses, which play a foremost role in the agricultural economy of all nations. Biotechnological manipulation offers great potential to provide for many improvements, including disease resistance and nutritional and processing qualities as well as abiotic stress tolerance and overall yield enhancement. The ability to control PTGS would allow for the increased production of a desired gene product or the ability to decrease or eliminate the expression of an undesired gene product. Thus, what is needed is a method to identify genes involved in PTGS in order that these genes may be regulated to either increase or decrease expression of a target gene. Also, the ability to control PTGS would allow for increased production of a desired product by overcoming gene silencing due to PTGS.

### SUMMARY OF THE INVENTION

[0013] The present invention relates to clusters or groups of polynucleotides from cereals, but especially from rice, the expression of which is altered in response to posttranscriptional gene silencing (PTGS).

[0014] The use of microarray technology has allowed the identification of such clusters of polynucleotides which are modulated within a cell by posttranscriptional gene silencing in Arabidopsis thaliana.

[0015] Provided herein are homologs and orthologs of such polynucleotide sequences in other plant species and in particular cereals. Thus, the invention provides polynucleic acid segments corresponding to genes modulated within a cell by posttranscriptional gene silencing from cereals, and homologs and orthologs thereof; variants of such sequences, and nucleotide sequences encoding substantially similar cereal PTGS-regulated polypeptides expressed therefrom.

[0016] In particular, the invention provides orthologs from cereal species to the nucleic acid segments corresponding to the nucleic acid sequences disclosed in international application no PCT/EP02/03806, filed Apr. 05, 2002 the disclosure of which is incorporated herein by reference in its entirety, and listed in sequence identifiers numbered 1-251, and the corresponding genes. These orthologs may be determined through visual insepection, mechanical and electronic means, such as a BLAST search.

[0017] The orthologs are nucleic acid sequences that encode polypeptides that are substantially similar to polypeptides encoded by any of the nucleic acid sequences listed in sequence identifiers numbered 1-251 of international application no PCT/EP02/03806, and the corresponding genes. Preferably the ortholog nucleic acid sequences have a similarity value less than 1×10⁻⁵ to the corresponding nucleic acid sequence selected from the nucleic acid sequences listed in sequence identifiers numbered 1-251 of international application no PCT/EP02/03806, and the corresponding genes. Preferably the similarity value is less than 1×10⁻¹⁰. More preferably the similarity value is less than 1×10⁻²⁰. More preferably the similarity value is less than 1×10⁻²⁵. Most preferably, the nucleic acid sequences are those identified in SEQ ID NOs: 1 to 342.

[0018] The invention additionally provides an expression cassette containing a regulatory sequence operably linked to a nucleic acid segment that is modulated within a cell by posttranscriptional gene silencing. A cell containing the expression cassette is provided. A construct containing a vector and an expression cassette, which has a regulatory sequence operably linked to a polynucleic acid segment of the invention, is provided. A cell containing a construct, having an expression cassette within a vector, is also provided. A mutagenesis cassette having an intervening nucleic acid sequence linked on both ends to a flanking nucleic acid sequence, which hybridizes under low stringency conditions to a gene that is modulated within a cell by posttranscriptional gene silencing is provided. Also provided is a construct that contains a vector and a mutagenesis cassette. Polypeptides are provided that are encoded by the polynucleic acid segments of the invention and variants thereof. The invention also provides a method to isolate a regulatory element that modulates the expression of a gene within a cell by posttranscriptional gene silencing. Accordingly, a regulatory element that modulates expression of a gene within a cell by posttranscriptional gene silencing is provided. An expression cassette containing a regulatory element that modulates gene expression by posttranscriptional gene silencing is provided. A method to create a mutant cell using the mutagenesis cassette of the invention is provided. A method to augment the genome of a plant with a polynucleic acid segment of the invention is provided. The seeds, fruit, and other products of the augmented plant are also provided. Transgenic plants containing the nucleic acid segments of the invention and that products of the transgenic plants are provided. A method to identify an expression product that interacts with an expression product that is modulated within a cell by posttranscriptional gene silencing is provided. Also provided is a method to modulate the expression of a gene by posttranscriptional gene silencing. Further provided are ortholog polynucleic acid sequences that hybridize under low stringency conditions to, to that encode polypeptides that are substantially similar to the nucleic acid segments of the invention. Also provided are cells and plants transformed with the orthologs of the invention as well as transgenic plants and the products thereof. The invention also provides methods to shuffle the nucleic acid segments of the invention to encode polypeptides that exhibit altered activity relative to the corresponding native polypeptide. Also provided is a computer readable medium containing the nucleic acid sequences of the invention as well as methods for use of the computer readable medium.

[0019] The methods to identify expression products modulated within a cell by posttranscriptional gene silencing involve extracting the expression products from two related cells that exhibit differences in posttranscriptional gene silencing and then comparing the products. This comparison allows for the determination of expression products that are up-modulated or down-modulated by posttranscriptional gene silencing. Preferably one of the related cells has posttranscriptional gene silencing while the other cell does not. Preferably the expression product is a polypeptide. More preferably the expression product is a transcription product. Most preferably the expression product is a messenger RNA. Preferably the cell is a plant cell. More preferably the cell is an embryophyte cell. Even more preferably the cell is an spermatophyte cell. Still even more preferably the cell is a eudicotyledon. Much more preferably the cell is a Brassicales cell. Most preferably the cell is from Arabidopsis. Preferably the cell is a cereal plant cell. More preferably the plant cell is from a plant that is grown for food. Most preferably the cell is from a plant that is commercially grown.

[0020] The present invention provides isolated polynucleic acid segments having at least 70%, preferably 80%, more preferably 90% and even more preferably 98% identity to the nucleic acid sequences corresponding to genes modulated within a cell by posttranscriptional gene silencing from cereals, but especially from rice, identified in Tables 1 and 2 and listed in the sequence listing, or the complement thereof. Also provided are variants of the nucleic acid sequences listed in the sequence listing. Most preferred embodiments include isolated polynucleic acid segments having at least 99% identity therewith. Preferred embodiments also include single unit percentage identities based upon these classes. For example, 71%, 72%, 73% and the like, up through at least the 99% class are preferred. A polynucleic acid segment according to the invention can be DNA or RNA. Preferably the isolated polynucleic acid segments modulate posttranscriptional gene silencing within a cell. Preferably a polynucleic acid segment of the invention is contained within a vector. More preferably the polynucleic acid segment of the invention is contained within a plasmid, phagemid, cosmid, virus, F-factor or phage. Most preferably the polynucleic acid segment of the invention is contained within a Ti plasmid.

[0021] One embodiment provides an isolated polynucleotide comprising a plant nucleotide sequence: (a) selected from the group consisting of (a) SEQ ID NOs: 1 to 341 or a fragment thereof which encodes a partial-length polypeptide having substantially the same activity as the full-length polypeptide; (b) having substantial similarity to (a); (c) having at least 15, at least 20, or at least 30 nucleotides and capable of hybridizing to (a) or the complement thereof under stringent, highly stringent or very highly conditions; (d) having at least 15, at least 20, or at least 30 nucleotides and capable of hybridizing to a nucleic acid comprising 50 to 200 or more consecutive nucleotides of a nucleotide sequence given in SEQ ID NOs: 1 to 341 or the complement thereof under stringent, highly stringent or very highly stringent conditions; (e) a sequence complementary to (a), (b) or (c); or (f) a sequence which is a reverse complement of (a), (b) or (c).

[0022] The invention also provides a construct containing a vector and a polynucleic acid segment having at least 70%, preferably 80%, more preferably 90% and even more preferably 98% identity to the nucleic acid sequences corresponding to genes modulated within a cell by posttranscriptional gene silencing from cereals, but especially from rice, identified in Tables 1 and 2 and listed in the sequence listing, or the complement thereof. Most preferred embodiments include polynucleic acid segments having at least 99% identity therewith. Preferred embodiments also include single unit percentage identities based upon these classes. For example, 71%, 72%, 73% and the like, up through at least the 99% class are preferred. Also included are variants of the cereal polynucleic acid sequences listed in the sequence listing. Preferably the vector is a plasmid, phagemid, cosmid, virus, F-factor or phage.

[0023] The invention provides an expression cassette containing a regulatory sequence operably linked to a polynucleic acid segment having at least 70%, preferably 80%, more preferably 90% and even more preferably 98% identity to the nucleic acid sequences corresponding to genes modulated within a cell by posttranscriptional gene silencing from cereals, but especially from rice, identified in Tables 1 and 2 and listed in the sequence listing, or the complement or variant thereof. Most preferred embodiments include cereal polynucleic acid segments having at least 99% identity therewith. Preferred embodiments also include single unit percentage identities based upon these classes. For example, 71%, 72%, 73% and the like, up through at least the 99% class are preferred. The expression cassette can also contain the polynucleic acid segment in an anti-sense orientation relative to the regulatory sequence. Preferably the regulatory sequence contains a promoter, operator, enhancer, repressor binding site and/or a transcription factor binding site. More preferably the regulatory sequence is a promoter. Most preferably the regulatory sequence is an inducible promoter. Preferably the expression cassette is contained within a cell. More preferably the expression cassette is contained within the genome of a cell. Most preferably the expression cassette is contained within the genome of a transgenic organism. Preferably the cell is a plant cell. More preferably the cell is an embryophyte cell. Even more preferably the cell is an spermatophyte cell. Still even more preferably the cell is a eudicotyledon. Much more preferably the cell is a cereal cell. Most preferably the cell is from rice. Preferably the cell is a cereal plant cell. More preferably the plant cell is from a plant that is grown for food. Most preferably the cell is from a plant that is commercially grown.

[0024] A construct containing a vector and an expression cassette is provided. Preferably the vector contained within the construct is a plasmid, cosmid, phagemid, virus, F-factor or phage. More preferably the vector contained within the construct is a virus. Most preferably the vector contained within the construct is a Ti plasmid. Preferably the construct is contained with a cell. More preferably the construct is contained within a plant cell. Even more preferably the cell is a cereal plant cell. Still even more preferably the cell is from a plant that is grown for food. Most preferably the cell is from a plant that is commercially grown. Preferably the plant cell is an embryophyte cell. Even more preferably the plant cell is an spermatophyte cell. Still even more preferably the plant cell is a eumonocotyledon. Much more preferably the plant cell is a cereal cell. Most preferably the plant cell is from rice.

[0025] The invention provides a mutagenesis cassette containing an intervening nucleic acid sequence linked on both ends to a flanking nucleic acid sequence that hybridizes under low stringency conditions to a gene that is modulated by posttranscriptional gene silencing. Preferably the intervening nucleic acid sequence is a selectable marker. More preferably the intervening nucleic acid sequence is a selectable marker for chemical resistance. Preferably the intervening nucleic acid sequence is linked on both ends to a flanking nucleic acid,sequence which hybridizes to a cereal nucleic acid sequence as listed in the sequence listing. More preferably the intervening nucleic acid sequence is linked on both ends to a flanking nucleic acid sequence that hybridizes to a nucleic acid sequence that modulates gene expression by posttranscriptional gene silencing. Preferably the mutagenesis cassette is contained within a vector. More preferably the mutagenesis cassette is contained within a cosmid, plasmid, phagemid, virus, phage, F-factor or Ti plasmid. Most preferably the mutagenesis cassette is contained within a Ti plasmid.

[0026] The invention also provides a polypeptide encoded by a nucleic acid sequence having at least 70%, preferably 80%, more preferably 90% and even more preferably 98% identity to the nucleic acid sequences corresponding to genes modulated within a cell by posttranscriptional gene silencing from cereals, but especially from rice, identified in Tables 1 and 2 and listed in the sequence listing. Most preferred embodiments include isolated polynucleic acid segments having at least 99% identity therewith. Preferred embodiments also include single unit percentage identities based upon these classes. For example, 71%, 72%, 73% and the like, up through at least the 99% class are preferred. Preferably the polypeptide of the invention modulates gene expression within a cell by posttranscriptional gene silencing.

[0027] Thus, a method to modulate gene expression by posttranscriptional gene silencing is provided by the invention. The method involves transforming a cell with a polynucleic acid segment that modulates gene expression by posttranscriptional gene silencing. Preferably the polynucleic acid segment is contained within an expression cassette. More preferably the polynucleic acid segment is included within a construct containing a vector and the polynucleic acid segment. Most preferably the polynucleic acid segment is contained within an expression cassette that is integrated into the chromosome of a cell. Preferably the cell is a plant cell. More preferably the cell is a cereal plant cell. Even more preferably the cell is from a plant that is grown for food. Most preferably the cell is from a plant that is commercially grown. Preferably the plant cell is an embryophyte cell. Even more preferably the plant cell is a spermatophyte cell. Still even more preferably the plant cell is a eudicotyledon. Much more preferably the plant cell is a cereal cell. Most preferably the plant cell is from rice.

[0028] A method to isolate a regulatory element that regulates expression of a polynucleic acid segment within a cell by posttranscriptional gene silencing is provided. The method involves hybridizing an oligonucleotide probe to a polynucleic acid segment that is regulated within a cell by posttranscriptional gene silencing. The polynucleic acid segment is contained within a polynucleic acid fragment that also contains the regulatory element. The complex containing the hybridized probe is then isolated to obtain the regulatory element. The nucleic acid within the formed complex may be sequenced to determine the nucleotide sequence of the regulatory element. Preferably the oligonucleotide probe is constructed from a sequence that hybridizes under low stringency conditions to a nucleic acid sequence corresponding to genes modulated within a cell by posttranscriptional gene silencing from cereals identified in Tables 1 and 2 and listed in the sequence listing or the complement thereof. Preferably the cell is a plant cell. More preferably the cell is a cereal plant cell. Most preferably the cell is from a plant that is grown commercially. Preferably the cell is a plant cell. Preferably the plant cell is an embryophyte cell. More preferably the plant cell is a spermatophyte cell. Even more preferably the plant cell is a eumonocotyledon. Much more preferably the plant cell is a cereal cell. Most preferably the plant cell is from rice.

[0029] Another method to obtain a regulatory element that modulates expression of a polynucleic acid segment within a cell by posttranscriptional gene silencing is provided. The method involves hybridizing an oligonucleotide primer to an open reading frame having expression that is modulated by posttranscriptional gene silencing. The open reading frame is contained within nucleic acid extracted from a cell that also contains the regulatory element that controls expression of the open reading frame. A second oligonucleotide primer is annealed to the nucleic acid extracted from the cell in a position that is 5′ or 3′ to the open reading frame. A polymerase chain reaction is conducted to amplify the nucleic acid located between the two primers. This amplified nucleic acid may be isolated to obtain the regulatory element. The amplified nucleic acid may also be sequenced to determine the nucleotide sequence of the regulatory element. Preferably the second oligonucleotide primer anneals to the nucleic acid extracted from the cell in a position that is 5′ to the open reading frame that is regulated within the cell by posttranscriptional gene silencing. Preferably the cell is a plant cell. More preferably the cell is a cereal plant cell. Most preferably the cell is from a plant that is commercially grown. Preferably the cell is a plant cell. Preferably the plant cell is an embryophyte cell. More preferably the plant cell is a spermatophyte cell. Even more preferably the plant cell is a eumonocotyledon. Much more preferably the plant cell is a cereal cell. Most preferably the plant cell is from rice. Preferably the nucleic acid extracted from the cell is from a chloroplast. More preferably the nucleic acid extracted from the cell is genomic DNA. Preferably the first oligonucleotide primer has at least 70%, preferably 80%, more preferably 90% and even more preferably 98% identity to the nucleic acid sequences corresponding to genes modulated within a cell by posttranscriptional gene silencing from cereals, but especially from rice, identified in Tables 1 and 2 and listed in sequence listing, or the complement thereof. Most preferably the first oligonucleotide primer has at least 99% identity therewith. Preferred embodiments also include single unit percentage identities based upon these classes. For example, 71%, 72%, 73% and the like, up through at least the 99% class. Preferably the second oligonucleotide primer is a degenerate primer. More preferably the second oligonucleotide primer is a multiplicity of degenerate primers. Preferably thermal asymmetric interlaced polymerase chain reaction is used to amplify the nucleic acid between the first and second primers. Accordingly, the invention also provides a regulatory element that modulates expression of an open reading frame by posttranscriptional gene silencing.

[0030] The invention also provides an expression cassette having a regulatory element that modulates expression of an operably linked open reading frame by posttranscriptional gene silencing. Preferably the expression cassette is included within a vector to form a construct. More preferably the construct containing the expression cassette and a vector is contained within a cell. Preferably the cell is a plant cell. More preferably the cell is a plant cell that is grown into a transgenic plant. Most preferably the cell is a plant cell that is grown into a commercial transgenic plant. Preferably the plant cell is an embryophyte cell. More preferably the plant cell is an spermatophyte cell. Even more preferably the plant cell is a eumonocotyledon. Much more preferably the plant cell is a cereal cell. Most preferably the plant cell is from rice. Preferably the plant cell is a cereal plant cell. More preferably the plant cell is from a plant that is grown for food. Most preferably the cell is from a plant that is commercially grown.

[0031] The invention also provides a method to augment the genome of a cell that includes contacting the nucleic acid within a cell with a polynucleic acid segment of the invention and growing the cell. Preferably the cell is a plant cell. More preferably the cell is a plant cell that is grown into a transgenic plant. Most preferably the cell is from a commercial plant and is grown into a transgenic plant. Preferably the plant cell is an embryophyte cell. More preferably the plant cell is an spermatophyte cell. Even more preferably the plant cell is a eumonocotyledon. Much more preferably the plant cell is a cereal cell. Most preferably the plant cell is from rices. Preferably the plant cell is a cereal plant cell. More preferably the plant cell is from a plant that is grown for food. Most preferably the cell is from a plant that is commercially grown. The polynucleic acid segment has at least 70%, preferably 80%, more preferably 90% and even more preferably 98% identity to the nucleic acid sequences corresponding to genes modulated within a cell by posttranscriptional gene silencing from cereals identified in Tables 1 and 2 and listed in the sequence listing. Most preferred embodiments include polynucleic acid segments having at least 99% identity therewith. Preferred embodiments also include single unit percentage identities based upon these classes. For example, 71%, 72%, 73% and the like, up through at least the 99% class. The invention also provides the seeds, fruits and other products of the augmented plant. The invention also provides a transgenic organism having a genome that contains the nucleic acid segments of the invention and the seeds, fruits, and other products thereof. Preferably the transgenic organism is a plant. More preferably the transgenic plant cell is an embryophyte. More preferably the transgenic plant is a spermatophyte. Even more preferably the transgenic plant is a eumonocotyledon. Much more preferably the transgenic plant is a cereal cell. Most preferably the transgenic plant is rice. Preferably the transgenic plant is a cereal plant cell. More preferably the transgenic plant is from a plant that is grown for food. Most preferably the transgenic plant is commercially grown.

[0032] The invention also provides a method of using the mutagenesis cassette to create a mutation in a cell. The method includes the steps of contacting the mutagenesis cassette with the nucleic acid within a cell to yield a cell having a mutation in a gene that is modulated by posttranscriptional gene silencing. Preferably the cell is a plant cell. More preferably the cell is a plant cell that is grown into a transgenic plant. Most preferably the cell is a plant cell that is grown into a commercial transgenic plant. Preferably the plant cell is an embryophyte cell. More preferably the plant cell is an spermatophyte cell. Even more preferably the plant cell is a eumonocotyledon. Much more preferably the plant cell is a cereal cell. Most preferably the plant cell is from nice. Preferably the plant cell is a cereal plant cell. More preferably the plant cell is from a plant that is grown for food. Most preferably the cell is from a plant that is commercially grown.

[0033] A method to identify a first expression product that interacts with an expression product modulated within a cell by posttranscriptional gene silencing is provided. The method involves contacting an expression product that is modulated with the first expression product to form a detectable complex and identifying the first expression product by separating the detectable complex. Preferably the expression product that is modulated is encoded by a nucleic acid sequence having at least 70%, preferably 80%, more preferably 90% and even more preferably 98% identity to the nucleic acid sequences corresponding to genes modulated within a cell by posttranscriptional gene silencing from cereals identified in Tables 1 and 2 and listed in the sequence listing, and the corresponding genes. Most preferred embodiments include expression products encoded by polynucleic acid segments having at least 99% identity therewith. Preferred embodiments also include single unit percentage identities based upon these classes. For example, 71%, 72%, 73% and the like, up through at least the 99% class. Preferably the nucleic acid sequence encoding the expression product that is modulated is used within a yeast two-hybrid system. Preferably the nucleic acid sequence encoding the expression product that is modulated is fused to a marker polypeptide that allows detection of the complex formed between the first expression product and the expression product that is modulated. Preferably the marker polypeptide is an epitope for an antibody. More preferably the marker polypeptide is glutathione S-transferase.

[0034] The invention provides orthologs from cereal species to the nucleic acid segments corresponding to the nucleic acid sequences listed in sequence identifiers numbered 1 to 342, and the corresponding genes. These orthologs may be determined through visual insepection, mechanical and electronic means, such as a BLAST search. The orthologs may be nucleic acid sequences that hybridize under low stringency conditions to any of the nucleic acid sequences listed in sequence identifiers numbered 1 to 342, and the corresponding genes. The orthologs may also be nucleic acid sequences that encode polypeptides that are substantially similar to polypeptides encoded by any of the nucleic acid sequences listed in sequence identifiers numbered 1 to 342, and the corresponding genes. Preferably the ortholog nucleic acid sequences have a similarity value less than 1×10⁻⁵ to the corresponding nucleic acid sequence selected from the nucleic acid sequences listed in sequence identifiers numbered 1 to 342, and the corresponding genes. More preferably the similarity value is less than 1×10⁻¹⁰. Even more preferably the similarity value is less than 1×10⁻²⁰. Most preferably the similarity value is less than 1×10²⁵.

[0035] Accordingly, the invention provides cells transformed with orthologs corresponding to a nucleic acid sequence listed in sequence identifiers numbered 1 to 342, and the corresponding genes. The invention also provides transgenic organisms containing the indicated ortholog sequences and the products thereof. The nucleic acid segments corresponding to the orthologs may be introduced into the cells, plants, and organisms according to methods known in the art and as indicated herein. Preferably the cell is a plant cell. More preferably the cell is a plant cell that is grown into a transgenic plant. Most preferably the cell is a plant cell that is grown into a commercial transgenic plant. Preferably the plant cell is an embryophyte cell. More preferably the plant cell is an spermatophyte cell. Even more preferably the plant cell is a eumonocotyledon. Much more preferably the plant cell is a cereal cell. Most preferably the plant cell is from rice. Preferably the plant cell is a cereal plant cell. More preferably the plant cell is from a plant that is grown for food. Most preferably the cell is from a plant that is commercially grown.

[0036] A method to shuffle the nucleic acids of the invention is provided. This method involves fragmentation of a nucleic acid corresponding to a nucleic acid sequence listed in sequence identifiers numbered 1 to 342; 473 to 539; 540 to 673, and 674 to 779, respectively, orthologs, and the corresponding genes, followed by religation. This method allows for the production of polypeptides having altered activity relative to the native form of the polypeptide. Preferably the cell is a plant cell. More preferably the plant cell is a cereal plant cell. Most preferably the cell is a plant cell that is commercially grown. Accordingly, the invention provides transgenic plants containing nucleic acid segments produced through shuffling that encode polypeptides having altered activity relative to the corresponding native polypeptide.

[0037] A computer readable medium containing the nucleic acid sequences of the invention as well as methods of use for the computer readable medium are provided. This medium allows a nucleic acid segment corresponding to a nucleic acid sequence listed in sequence identifiers numbered 1 to 342; 473 to 539; 540 to 673, and 674 to 779 respectively, and the corresponding genes to be used as a reference sequence to search against databases. This medium allows for computer-based manipulation of a nucleic acid sequence corresponding to a nucleic acid sequence listed in sequence identifiers numbered 1 to 342; 473 to 539; 540 to 673, and 674 to 779 respectively, and the corresponding gene and polypeptide encoded by the nucleic acid sequence. Preferably the nucleic acid sequences of the invention encode polypeptides involved with silencing-related RNA and DNA metabolism (e.g., RNA helicases, RNAses, reverse transcriptase, histones, histone acetyltransferases); signal transduction (e.g., protein kinases, receptors, and calmodulin); transcription factors; stress-related and pathogen-related proteins; and general metabolism. More prefered are reverse transcribase-like protein and histone acetyltransferase-like protein.

[0038] Definitions

[0039] Certain terms used in describing the present invention are defined in the following section

[0040] “Altered levels” refers to the level of expression in transgenic organisms that differs from that of normal or untransformed organisms.

[0041] The term “altered plant trait” means any phenotypic or genotypic change in a transgenic plant relative to the wild-type or non-transgenic plant host.

[0042] “Antisense inhibition” refers to the production of antisense RNA transcripts capable of suppressing the expression of protein from an endogenous gene or a transgene.

[0043] The term “average expression” is used here as the average level of expression found in all lines that do express detectable amounts of reporter gene, so leaving out of the analysis plants that do not express any detectable reporter mRNA or -protein.

[0044] “Chimeric” is used to indicate that a DNA sequence, such as a vector or a gene, is comprised of more than one DNA sequences of distinct origin with are fused together by recombinant DNA techniques resulting in a DNA sequence, which does not occur naturally.

[0045] The term “chimeric gene” refers to any gene that contains 1) DNA sequences, including regulatory and coding sequences, that are not found together in nature, or 2) sequences encoding parts of proteins not naturally adjoined, or 3) parts of promoters that are not naturally adjoined. Accordingly, a chimeric gene may comprise regulatory sequences and coding sequences that are derived from different sources, or comprise regulatory sequences and coding sequences derived from the same source, but arranged in a manner different from that found in nature.

[0046] “Chromosomally-integrated” refers to the integration of a foreign gene or DNA construct into the host DNA by covalent bonds. Where genes are not “chromosomally integrated” they may be “transiently expressed.” Transient expression of a gene refers to the expression of a gene that is not integrated into the host chromosome but functions independently, either as part of an autonomously replicating plasmid or expression cassette, for example, or as part of another biological system such as a virus.

[0047] The terms “cis-acting sequence” and “cis-acting element” refer to DNA or RNA sequences whose functions require them to be on the same molecule. An example of a cis-acting sequence on the replicon is the viral replication origin.

[0048] “Cloning vectors” typically contain one or a small number of restriction endonuclease recognition sites at which foreign DNA sequences can be inserted in a determinable fashion without loss of essential biological function of the vector, as well as a marker gene that is suitable for use in the identification and selection of cells transformed with the cloning vector. Marker genes typically include genes that provide tetracycline resistance, hygromycin resistance or ampicillin resistance.

[0049] “Coding sequence” refers to a DNA or RNA sequence that codes for a specific amino acid sequence and excludes the non-coding sequences. It may constitute an “uninterrupted coding sequence”, i.e., lacking an intron, such as in a cDNA or it may include one or more introns bounded by appropriate splice junctions. An “intron” is a sequence of RNA which is contained in the primary transcript but which is removed through cleavage and re-ligation of the RNA within the cell to create the mature mRNA that can be translated into a protein.

[0050] “Constitutive expression” refers to expression using a constitutive or regulated promoter. “Conditional” and “regulated expression” refer to expression controlled by a regulated promoter.

[0051] “Constitutive promoter” refers to a promoter that is able to express the gene that it controls in all or nearly all of the plant tissues during all or nearly all developmental stages of the plant. Each of the transcription-activating elements do not exhibit an absolute tissue-specificity, but mediate transcriptional activation in most plant parts at a level of ≧1% of the level reached in the part of the plant in which transcription is most active.

[0052] The term “contacting” may include any method known or described for introducing a nucleic acid into a cell.

[0053] “Episome” and “replicon” refer to a DNA or RNA virus or a vector that undergoes episomal replication in plant cells. It contains cis-acting viral sequences, such as the replication origin, necessary for replication. It may or may not contain trans-acting viral sequences necessary for replication, such as the viral replication genes (for example, the AC1 and AL1 genes in ACMV and TGMV geminiviruses, respectively). It may or may not contain a target gene for expression in the host plant.

[0054] “Expression” refers to the transcription and/or translation of an endogenous gene or a transgene in plants. For example, in the case of antisense constructs, expression may refer to the transcription of the antisense DNA only. In addition, expression refers to the transcription and stable accumulation of sense (mRNA) or functional RNA. Expression may also refer to the production of protein.

[0055] “Expression cassette” as used herein means a DNA sequence capable of directing expression of a particular nucleotide sequence in an appropriate host cell, comprising a promoter operably linked to the nucleotide sequence of interest which is operably linked to termination signals. It also typically comprises sequences required for proper translation of the nucleotide sequence. The coding region usually codes for a protein of interest but may also code for a functional RNA of interest, for example antisense RNA, an untranslated RNA, a transfer RNA or a small nuclear RNA in the sense or antisense direction. The expression cassette comprising the nucleotide sequence of interest may be chimeric, meaning that at least one of its components is heterologous with respect to at least one of its other components. The expression cassette may also be one which is naturally occurring but has been obtained in a recombinant form useful for heterologous expression. The expression of the nucleotide sequence in the expression cassette may be under the control of a constitutive promoter or of an inducible promoter which initiates transcription only when the host cell is exposed to some particular external stimulus. In the case of a multicellular organism, the promoter can also be specific to a particular tissue or organ or stage of development.

[0056] The “expression pattern” of a promoter (with or without enhancer) is the pattern of expression levels which shows where in the plant and in what developmental stage transcription is initiated by the promoter. Expression patterns of a set of promoters are said to be complementary when the expression pattern of one promoter shows little overlap with the expression pattern of the other promoter. The level of expression of a promoter can be determined by measuring the ‘steady state’ concentration of a standard transcribed reporter mRNA. This measurement is indirect since the concentration of the reporter mRNA is dependent not only on its synthesis rate, but also on the rate with which the mRNA is degraded. Therefore the steady state level is the product of synthesis rates and degradation rates.

[0057] The rate of degradation can however be considered to proceed at a fixed rate when the transcribed sequences are identical, and thus this value can serve as a measure of synthesis rates. When promoters are compared in this way techniques available to those skilled in the art are hybridization S1-RNAse analysis. Northern blots and competitive RT-PCR. This list of techniques in no way represents all available techniques, but rather describes commonly used procedures used to analyze transcription activity and expression levels of mRNA.

[0058] The analysis of transcription start points in practically all promoters has revealed that there is usually no single base at which transcription starts, but rather a more or less clustered set of initiation sites, each of which accounts for some start points of the mRNA. Since this distribution varies from promoter to promoter the sequences of the reporter mRNA in each of the populations would differ from each other. Since each mRNA species is more or less prone to degradation, no single degradation rate can be expected for different reporter mRNAs. It has been shown for various eukaryotic promoter sequences that the sequence surrounding the initiation site (‘initiator’) plays an important role in determining the level of RNA expression directed by that specific promoter. This includes also part of the transcribed sequences. The direct fusion of promoter to reporter sequences would therefore lead to suboptimal levels of transcription.

[0059] A commonly used procedure to analyze expression patterns and levels is through determination of the ‘steady state’ level of protein accumulation in a cell. Commonly used candidates for the reporter gene, known to those skilled in the art are 9-glucuronidase (GUS), Chloramphenicol Acetyl Transferase (CAT) and proteins with fluorescent properties, such as Green Fluorescent Protein (GFP) from Aequora victoria. In principle, however, many more proteins are suitable for this purpose, provided the protein does not interfere with essential plant functions. For quantification and determination of localization a number of tools are suited. Detection systems can readily be created or are available which are based on e.g. immunochemical, enzymatic, fluorescent detection and quantification. Protein levels can be determined in plant tissue extracts or in intact tissue using in situ analysis of protein expression.

[0060] Generally, individual transformed lines with one chimeric promoter reporter construct will vary in their levels of expression of the reporter gene. Also frequently observed is the phenomenon that such transformants do not express any detectable product (RNA or protein). The variability in expression is commonly ascribed to ‘position effects, although the molecular mechanisms underlying this inactivity are usually not clear.

[0061] “5′ non-coding sequence” refers to a nucleotide sequence located 5′ (upstream) to the coding sequence. It is present in the fully processed mRNA upstream of the initiation codon and may affect processing of the primary transcript to mRNA, mRNA stability or translation efficiency. Turner et al., Molecular Biotechnology, 3:225 (1995).

[0062] A “functional RNA” refers to an antisense RNA, ribozyme, transfer RNA, small nuclear RNA, or other RNA that is not translated.

[0063] The term “gene” is used broadly to refer to any segment of nucleic acid associated with a biological function. Thus, genes include coding sequences and/or the regulatory sequences required for their expression. For example, gene refers to a nucleic acid fragment that expresses mRNA, functional RNA, or specific protein, including regulatory sequences. Genes also include nonexpressed DNA segments that, for example, form recognition sequences for other proteins. Genes can be obtained from a variety of sources, including cloning from a source of interest or synthesizing from known or predicted sequence information, and may include sequences designed to have desired parameters.

[0064] “Genetically stable” and “heritable” refer to chromosomally-integrated genetic elements that are stably maintained in the plant and stably inherited by progeny through successive generations.

[0065] “Genome” refers to the complete genetic material of an organism.

[0066] “Germline cells” refer to cells that are destined to be gametes and whose genetic material is heritable.

[0067] The terms “heterologous DNA sequence,” “exogenous DNA segment” or “heterologous polynucleic acid,” as used herein, each refer to a sequence that originates from a source foreign to the particular host cell or, if from the same source, is modified from its original form. Thus, a heterologous gene in a host cell includes a gene that is endogenous to the particular host cell but has been modified through, for example, the use of DNA shuffling. The terms also include non-naturally occurring multiple copies of a naturally occurring DNA sequence. Thus, the terms refer to a DNA segment that is foreign or heterologous to the cell, or homologous to the cell but in a position within the host cell nucleic acid in which the element is not ordinarily found. Exogenous DNA segments are expressed to yield exogenous polypeptides.

[0068] A “homologous” DNA sequence is a DNA sequence that is naturally associated with a host cell into which it is introduced.

[0069] “Homologous to” refers to the similarity between the nucleotide sequence of two nucleic acid molecules or between the amino acid sequences of two protein molecules. Estimates of such homology are provided by either DNA-DNA or DNA-RNA hybridization under conditions of stringency as is well understood by those skilled in the art (as described in Haines and Higgins (eds.), Nucleic Acid Hybridization, IRL Press, Oxford, U.K.), or by the comparison of sequence similarity between two nucleic acids or proteins.

[0070] Hybridization of polynucleic acid sequences may be carried out under stringent conditions. “Stringent hybridization conditions” and “stringent hybridization wash conditions” in the context of nucleic acid hybridization experiments such as Southern and Northern hybridization are sequence dependent, and are different under different environmental parameters. Longer sequences hybridize specifically at higher temperatures. An extensive guide to the hybridization o nucleic acids is found in Tijssen, Laboratory Techniques in Biochemistry and Molecular biology-Hybridization with Nucleic Acid Probes, page 1, chapter 2 “Overview of principles of hybridization and the strategy of nucleic acid probe assays” Elsevier, N.Y. (1993). Generally, highly stringent hybridization and wash conditions are selected to be about 5/C. lower than the thermal melting point (Tₘ) for the specific sequence at a defined ionic strength and pH. Typically, under “stringent conditions” a probe will hybridize to its target subsequence, but to no other sequences. For example, by “stringent conditions” or “stringent hybridization conditions” is intended conditions under which a probe will hybridize to its target sequence to a detectably greater degree than to other sequences (e.g., at least 2- fold over background). By controlling the stringency of the hybridization and/or washing conditions, target sequences that are 100% complementary to the probe can be identified (homologous probing). Alternatively, stringency conditions can be adjusted to allow some mismatching in sequences so that lower degrees of similarity are detected (heterologous probing). Generally, a probe is less than about 1000 nucleotides in length, preferably less than 500 nucleotides in length.

[0071] Typically, stringent conditions will be those in which the salt concentration is less than about 1.5 M Na ion, typically about 0.01 to 1.0 M Na ion concentration (or other salts) at pH 7.0 to 8.3 and the temperature is at least about 30° C. for short probes (e.g., 10 to 50 nucleotides) and at least about 60° C. for long probes (e.g., greater than 50 nucleotides). Stringent conditions may also be achieved with the addition of destabilizing agents such as formamide.

[0072] Exemplary low stringency conditions include hybridization with a buffer solution of 30 to 35% formamide, 1 M NaCl, 1% SDS (sodium dodecyl sulphate) at 37° C., and a wash in 1× to 2×SSC (20×SSC=3.0 M NaCl/0.3 M trisodium citrate) at 50 to 55° C. Exemplary moderate stringency conditions include hybridization in 40 to 45% formamide, 1.0 M NaCl, 1% SDS at 37° C., and a wash in 0.5× to 1×SSC at 55 to 60° C. Exemplary high stringency conditions include hybridization in 50% formamide, 1 M NaCl, 1% SDS at 37° C., and a wash in 0.1×SSC at 60 to 65° C.

[0073] Specificity is typically the function of post-hybridization washes, the critical factors being the ionic strength and temperature of the final wash solution. For DNA-DNA hybrids, the Tₘ can be approximated from the equation of Meinkoth and Wahl Anal. Biochem. 138:267-284 (1984); Tₘ 81.5° C.+16.6 (log M)+0.41 (%GC)−0.61 (% form)−500/L; where M is the molarity of monovalent cations, %GC is the percentage of guanosine and cytosine nucleotides in the DNA, % form is the percentage of formamide in the hybridization solution, and L is the length of the hybrid in base pairs. The Tₘ is the temperature (under defined ionic strength and pH) at which 50% of a complementary target sequence hybridizes to a perfectly matched probe.

[0074] Very stringent conditions are selected to be equal to the Tₘ for a particular probe. An example of stringent hybridization conditions for hybridization of complementary nucleic acids which have more than 100 complementary residues on a filter in a Southern or Northern blot is 50% formamide with 1 mg of heparin at 42/C., with the hybridization being carried out overnight. An example of highly stringent conditions is 0.15 M NaCl at 72/C. for about 15 minutes. An example of stringent wash conditions is a 0.2×SSC wash at 65/C. for 15 minutes (see, Sambrook, infra, for a description of SSC buffer). Often, a high stringency wash is preceded by a low stringency wash to remove background probe signal. An example of medium stringency for a duplex of, e.g., more than 100 nucleotides, is 1×SSC at 45/C. for 15 minutes. An example low stringency wash for a duplex of, e.g., more than 100 nucleotides, is 4-6×SSC at 40/C. for 15 minutes. For short probes (e.g., about 10 to 50 nucleotides), stringent conditions typically involve salt concentrations of less than about 1.0M Na ion, typically about 0.01 to 1.0 M Na ion concentration (or other slats) at pH 7.0 to 8.3, and the temperature is typically at least about 30/C. Stringent conditions can also be achieved with the addition of destabilizing agents such as formamide. In general, a signal to noise ratio of 2× (or higher) than that observed for an unrelated probe in the particular hybridization assay indicates detection of a specific hybridization. Nucleic acids that do not hybridize to each other under stringent conditions are still substantially identical if the proteins that they encode are substantially identical. This occurs, e.g., when a copy of a nucleic acid is created using the maximum codon degeneracy permitted by the genetic code.

[0075] The following are examples of sets of hybridization/wash conditions that may be used to clone homologous polynucleic acid sequences that are substantially identical to the polynucleic acid segments of the present invention: the homologous polynucleic acid sequence preferably hybridizes to the polynucleic acid segment in 7% sodium dodecyl sulfate (SDS), 0.5 M NaPO₄, 1 mM EDTA at 50/C. with washing in 2×SSC, 0.1% SDS at 50/C., more desirably in 7% sodium dodecyl sulfate (SDS), 0.5 M NaPO₄, 1 mM EDTA at 50/C. with washing in 1×SSC, 0.1% SDS at 50/C., more desirably still in 7% sodium dodecyl sulfate (SDS), 0.5 M NaPO₄, 1 mM EDTA at 50/C. with washing in 0.5×SSC, 0.1% SDS at 50/C., preferably in 7% sodium dodecyl sulfate (SDS), 0.5 M NaPO₄, 1 mM EDTA at 50/C. with washing in 0.1×SSC, 0.1% SDS at 50/C., more preferably in 7% sodium dodecyl sulfate (SDS), 0.5 M NaPO₄, 1 mM EDTA at 50/C. with washing in 0.1×SSC, 0.1% SDS at 65/C.

[0076] Tₘ is reduced by about 1° C. for each 1% of mismatching; thus, Tₘ, hybridization, and/or wash conditions can be adjusted to hybridize to sequences of the desired identity. For example, if polynucleic acid sequences with >90% identity are sought, the Tₘ can be decreased 10° C. Generally, stringent conditions are selected to be about 5° C. lower than the thermal melting point (Tₘ) for the specific sequence and its complement at a defined ionic strength and pH. However, severely stringent conditions can utilize a hybridization and/or wash at 1, 2, 3, or 4° C. lower than the thermal melting point (Tₘ); moderately stringent conditions can utilize a hybridization and/or wash at 6, 7, 8, 9, or 10° C. lower than the thermal melting point (Tₘ); low stringency conditions can utilize a hybridization and/or wash at 11, 12, 13, 14, 15, or 20° C. lower than the thermal melting point (Tₘ). Using the equation, hybridization and wash compositions, and desired T, those of ordinary skill will understand that variations in the stringency of hybridization and/or wash solutions are inherently described. If the desired degree of mismatching results in a T of less than 45° C. (aqueous solution) or 32° C. (formamide solution), it is preferred to increase the SSC concentration so that a higher temperature can be used. An extensive guide to the hybridization of nucleic acids is found in Tijssen (1993) Laboratory Techniques in Biochemistry and Molecular Biology-Hybridization with Nucleic Acid Probes, Part 1, Chapter 2 (Elsevier, N.Y.); and Ausubel et al., eds. (1995) Current Protocols in Molecular Biology, Chapter 2 (Greene Publishing and Wiley—Interscience, New York). See Sambrook et al. (1989) Molecular Cloning: A Laboratory Manual (2d ed., Cold Spring Harbor Laboratory Press, Plainview, N.Y.).

[0077] Generally, stringent conditions are selected to be about 5° C. lower than the thermal melting point (Tm) for the specific sequence at a defined ionic strength and pH. However, stringent conditions encompass temperatures in the range of about 1° C. to about 20° C., depending upon the desired degree of stringency as otherwise qualified herein. Polynucleic acid sequences that do not hybridize to each other under stringent conditions are still substantially identical if the polypeptides they encode are substantially identical. This may occur, e.g., when a copy of a nucleic acid is created using the maximum codon degeneracy permitted by the genetic code. One indication that two polynucleic acid sequences are substantially identical is when the polypeptide encoded by the first nucleic acid is immunologically cross reactive with the polypeptide encoded by the second nucleic acid.

[0078] The terms “in cis” and “in trans” refer to the presence of DNA elements, such as the viral origin of replication and the replication protein(s) gene, on the same DNA molecule or on a different DNA molecule, respectively.

[0079] “Inducible promoter” refers to those regulated promoters that can be turned on in one or more cell types by an external stimulus, such as a chemical, light, hormone, stress, or a pathogen.

[0080] The “initiation site” is the position surrounding the first nucleotide that is part of the transcribed sequence, which is also defined as position +1. With respect to this site all other sequences of the gene and its controlling regions are numbered. Downstream sequences (i.e. further protein encoding sequences in the 3′ direction) are denominated positive, while upstream sequences (mostly of the controlling regions in the 5′ direction) are denominated negative.

[0081] The term “intracellular localization sequence” refers to a nucleotide sequence that encodes an intracellular targeting signal. An “intracellular targeting signal” is an amino acid sequence that is translated in conjunction with a protein and directs it to a particular sub-cellular compartment. “Endoplasmic reticulum (ER) stop transit signal” refers to a carboxy-terminal extension of a polypeptide, which is translated in conjunction with the polypeptide and causes a protein that enters the secretory pathway to be retained in the ER. “ER stop transit sequence” refers to a nucleotide sequence that encodes the ER targeting signal. Other intracellular targeting sequences encode targeting signals active in seeds and/or leaves and vacuolar targeting signals.

[0082] The invention encompasses isolated or substantially purified nucleic acid or protein compositions. In the context of the present invention, an “isolated” or “purified” polynucleic acid segment or an “isolated” or “purified” polypeptide is a polynucleic acid segment or polypeptide that, by the hand of man, exists apart from its native environment and is therefore not a product of nature. An isolated polynucleic acid segment or polypeptide may exist in a purified form or may exist in a non-native environment such as, for example, a transgenic host cell. For example, an “isolated” or “purified” polynucleic acid segment or protein, or biologically active portion thereof, is substantially free of other cellular material, or culture medium when produced by recombinant techniques, or substantially free of chemical precursors or other chemicals when chemically synthesized.

[0083] Preferably, an “isolated” polynucleic acid is free of sequences (preferably protein encoding sequences) that naturally flank the nucleic acid (i.e., sequences located at the 5′ and 3′ ends of the nucleic acid) in the genomic DNA of the organism from which the nucleic acid is derived. For example, in various embodiments, the isolated nucleic acid molecule can contain less than about 5 kb, 4 kb, 3 kb, 2 kb, 1 kb, 0.5 kb, or 0.1 kb of nucleotide sequences that naturally flank the nucleic acid molecule in genomic DNA of the cell from which the nucleic acid is derived. A protein that is substantially free of cellular material includes preparations of protein or polypeptide having less than about 30%, 20%, 10%, 5%, (by dry weight) of contaminating protein. When the protein of the invention, or biologically active portion thereof, is recombinantly produced, preferably culture medium represents less than about 30%, 20%, 10%, or 5% (by dry weight) of chemical precursors or non-protein-of-interest chemicals.

[0084] Fragments and variants of the disclosed nucleotide sequences and proteins or partial-length proteins encoded thereby are also encompassed by the present invention. By “fragment” is intended a portion of the nucleotide sequence or a portion of the amino acid sequence, and hence a portion of the polypeptide or protein, encoded thereby. Alternatively, fragments of a polynucleic acid sequence that are useful as hybridization probes generally do not encode fragment proteins retaining biological activity. Thus, fragments of a nucleotide sequence may range from at least about 9 nucleotides, about 12 nucleotides, about 20 nucleotides, about 50 nucleotides, about 100 nucleotides or more.

[0085] A “marker gene” encodes a selectable or screenable trait.

[0086] The term “mature” protein refers to a post-translationally processed polypeptide without its signal peptide. “Precursor” protein refers to the primary product of translation of an mRNA. “Signal peptide” refers to the amino terminal extension of a polypeptide, which is translated in conjunction with the polypeptide forming a precursor peptide and which is required for its entrance into the secretory pathway. The term “signal sequence” refers to a nucleotide sequence that encodes the signal peptide.

[0087] The terms “modulate”, “modulates” and are used to broadly refer to alteration of the quantity or activity of a product that is expressed within a cell. As used herein, the alteration may include increased or decreased transcription or translation of a gene.

[0088] The term “native gene” refers to gene that is present in the genome of an untransformed cell.

[0089] “Naturally occurring” is used to describe an object that can be found in nature as distinct from being artificially produced by man. For example, a protein or nucleotide sequence present in an organism (including a virus), which can be isolated from a source in nature and which has not been intentionally modified by man in the laboratory, is naturally occurring.

[0090] “Non-specific expression” refers to constitutive expression or low level, basal (‘leaky’) expression in nondesired cells or tissues from a ‘regulated promoter’.

[0091] The term “nucleic acid”, “polynucleic acid” or “polynucleic acid segment” refers to deoxyribonucleotides or ribonucleotides and polymers thereof in either single- or double-stranded form, composed of monomers (nucleotides) containing a sugar, phosphate and a base which is either a purine or pyrimidine. Unless specifically limited, the term encompasses nucleic acids containing known analogs of natural nucleotides which have similar binding properties as the reference nucleic acid and are metabolized in a manner similar to naturally occurring nucleotides. Unless otherwise indicated, a particular nucleic acid sequence also implicitly encompasses conservatively modified variants thereof (e.g., degenerate codon substitutions) and complementary sequences as well as the sequence explicitly indicated. Specifically, degenerate codon substitutions may be achieved by generating sequences in which the third position of one or more selected (or all) codons is substituted with mixed-base and/or deoxyinosine residues (Batzer et al., Nucleic Acid Res., 19:5081 (1991); Ohtsuka et al., J. Biol. Chem., 260:2605 (1985); Rossolini et al., Mol. Cell. Probes, 8:91 (1994)).

[0092] A “nucleic acid fragment” is a fraction of a given nucleic acid molecule. In higher plants, deoxyribonucleic acid (DNA) is the genetic material while ribonucleic acid (RNA) is involved in the transfer of information contained within DNA into proteins. A “genome” is the entire body of genetic material contained in each cell of an organism. The term “nucleotide sequence” refers to a polymer of DNA or RNA which can be single- or double-stranded, optionally containing synthetic, non-natural or altered nucleotide bases capable of incorporation into DNA or RNA polymers. The terms “nucleic acid” or “nucleic acid sequence” may also be used interchangeably with gene, cDNA, DNA and RNA encoded by a gene.

[0093] An “oligonucleotide” for use in probing or amplification reactions may be about 30 or fewer nucleotides in length (e.g., 9, 12, 15, 18, 20, 21 or 24, or any number between 9 and 30). Generally specific primers are upwards of 14 nucleotides in length. For optimum specificity and cost effectiveness, primers of 16-24 nucleotides in length may be preferred. Those skilled in the art are well versed in the design of primers for use processes such as PCR. If required, probing can be done with entire restriction fragments of the gene disclosed herein which may be 100's or even 1000's of nucleotides in length.

[0094] The terms “open reading frame” and “ORF” refer to the amino acid sequence encoded between translation initiation and termination codons of a coding sequence. The terms “initiation codon” and “termination codon” refer to a unit of three adjacent nucleotides (‘codon’) in a coding sequence that specifies initiation and chain termination, respectively, of protein synthesis (mRNA translation).

[0095] “Operably linked” means joined as part of the same nucleic acid molecule, suitably positioned and oriented for transcription to be initiated from the promoter. DNA operably linked to a promoter is “under transcriptional initiation regulation” of the promoter. Coding sequences can be operably-linked to regulatory sequences in sense or antisense orientation.

[0096] “Overexpression” refers to the level of expression in transgenic organisms that exceeds levels of expression in normal or untransformed organisms.

[0097] Known methods of polymerase chain reaction “PCR” include, but are not limited to, methods using paired primers, nested primers, single specific primers, degenerate primers, gene-specific primers, vector-specific primers, partially mismatched primers, and the like. See also Innis et al., eds., PCR Protocols: A Guide to Methods and Applications (Academic Press, New York (1995); and Gelfand, eds., PCR Strategies (Academic Press, New York (1995); and Innis and Gelfand, eds., PCR Methods Manual (Academic Press, New York) (1999).

[0098] “Plant tissue” includes differentiated and undifferentiated tissues or plants, including but not limited to roots, stems, shoots, leaves, pollen, seeds, tumor tissue and various forms of cells and culture such as single cells, protoplast, embryos, and callus tissue. The plant tissue may be in plants or in organ, tissue or cell culture.

[0099] “Primary transformant” and “TO generation” refer to transgenic plants that are of the same genetic generation as the tissue which was initially transformed (i.e., not having gone through meiosis and fertilization since transformation). “Production tissue” refers to mature, harvestable tissue consisting of non-dividing, terminally-differentiated cells. It excludes young, growing tissue consisting of germline, meristematic, and not-fully-differentiated cells.

[0100] “Promoter” refers to a nucleotide sequence, usually upstream (5′) to its coding sequence, which controls the expression of the coding sequence by providing the recognition for RNA polymerase and other factors required for proper transcription. “Promoter” includes a minimal promoter that is a short DNA sequence comprised of a TATA-box and other sequences that serve to specify the site of transcription initiation, to which regulatory elements are added for control of expression. “Promoter” also refers to a nucleotide sequence that includes a minimal promoter plus regulatory elements that is capable of controlling the expression of a coding sequence or functional RNA. This type of promoter sequence consists of proximal and more distal upstream elements, the latter elements often referred to as enhancers. Accordingly, an “enhancer” is a DNA sequence which can stimulate promoter activity and may be an innate element of the promoter or a heterologous element inserted to enhance the level or tissue specificity of a promoter. It is capable of operating in both orientations (normal or flipped), and is capable of functioning even when moved either upstream or downstream from the promoter. Both enhancers and other upstream promoter elements bind sequence-specific DNA-binding proteins that mediate their effects. Promoters may be derived in their entirety from a native gene, or be composed of different elements derived from different promoters found in nature, or even be comprised of synthetic DNA segments. A promoter may also contain DNA sequences that are involved in the binding of protein factors which control the effectiveness of transcription initiation in response to physiological or developmental conditions.

[0101] Promoter elements, particularly a TATA element, that are inactive or that have greatly reduced promoter activity in the absence of upstream activation are referred to as “minimal or core promoters.” In the presence of a suitable transcription factor, the minimal promoter functions to permit transcription. A “minimal or core promoter” thus consists only of all basal elements needed for transcription initiation, e.g., a TATA box and/or an initiator.

[0102] The terms “protein,” “peptide” and “polypeptide” are used interchangeably herein.

[0103] “Regulated promoter” refers to promoters that direct gene expression not constitutively, but in a temporally- and/or spatially-regulated manner, and include both tissue-specific and inducible promoters. It includes natural and synthetic sequences as well as sequences which may be a combination of synthetic and natural sequences. Different promoters may direct the expression of a gene in different tissues or cell types, or at different stages of development, or in response to different environmental conditions. New promoters of various types useful in plant cells are constantly being discovered, numerous examples may be found in the compilation by Okamuro et al., Biochemistry of Plants, 15:1 (1989). Since in most cases the exact boundaries of regulatory sequences have not been completely defined, DNA fragments of different lengths may have identical promoter activity. Typical regulated promoters useful in plants include but are not limited to safener-inducible promoters, promoters derived from the tetracycline-inducible system, promoters derived from salicylate-inducible systems, promoters derived from alcohol-inducible systems, promoters derived from glucocorticoid-inducible system, promoters derived from pathogen-inducible systems, and promoters derived from ecdysome-inducible systems.

[0104] “Regulatory sequences” and “suitable regulatory sequences” each refer to nucleotide sequences located upstream (5′ non-coding sequences), within, or downstream (3′ non-coding sequences) of a coding sequence, and which influence the transcription, RNA processing or stability, or translation of the associated coding sequence. Regulatory sequences include enhancers, promoters, translation leader sequences, introns, and polyadenylation signal sequences. They include natural and synthetic sequences as well as sequences which may be a combination of synthetic and natural sequences. As is noted above, the term “suitable regulatory sequences” is not limited to promoters. However, some suitable regulatory sequences useful in the present invention will include, but are not limited to constitutive plant promoters, plant tissue-specific promoters. plant development-specific promoters, inducible plant promoters and viral promoters.

[0105] “Replication origin” refers to a cis-acting replication sequence essential for viral or episomal replication.

[0106] The term “RNA transcript” refers to the product resulting from RNA polymerase catalyzed transcription of a DNA sequence. When the RNA transcript is a perfect complementary copy of the DNA sequence, it is referred to as the primary transcript or it may be a RNA sequence derived from posttranscriptional processing of the primary transcript and is referred to as the mature RNA. “Messenger RNA” (mRNA) refers to the RNA that is without introns and that can be translated into protein by the cell. “cDNA” refers to a single- or a double-stranded DNA that is complementary to and derived from mRNA.

[0107] “Secondary transformants” and the “T1, T2, T3, etc. generations” refer to transgenic plants derived from primary transformants through one or more meiotic and fertilization cycles. They may be derived by self-fertilization of primary or secondary transformants or crosses of primary or secondary transformants with other transformed or untransformed plants.

[0108] The following terms are used to describe the sequence relationships between two or more nucleic acids or polynucleotides: (a) “reference sequence”, (b) “comparison window”, (c) “sequence identity”, (d) “percentage of sequence identity”, and (e) “substantial identity”.

[0109] (a) As used herein, “reference sequence” is a defined sequence used as a basis for sequence comparison. A reference sequence may be a subset or the entirety of a specified sequence; for example, as a segment of a full length cDNA or gene sequence, or the complete cDNA or gene sequence.

[0110] (b) As used herein, “comparison window” makes reference to a contiguous and specified segment of a polynucleic acid sequence, wherein the polynucleic acid sequence in the comparison window may comprise additions or deletions (i.e., gaps) compared to the reference sequence (which does not comprise additions or deletions) for optimal alignment of the two sequences. Generally, the comparison window is at least 20 contiguous nucleotides in length, and optionally can be 30, 40, 50, 100, or longer. Those of skill in the art understand that to avoid a high similarity to a reference sequence due to inclusion of gaps in the polynucleotide sequence a gap penalty is typically introduced and is subtracted from the number of matches.

[0111] Methods of alignment of sequences for comparison are well known in the art. Thus, the determination of percent identity between any two sequences can be accomplished using a mathematical algorithm. Preferred, non-limiting examples of such mathematical algorithms are the algorithm of Myers and Miller, CABIOS, 4:11 (1988); the local homology algorithm of Smith et al., Adv. Appl. Math., 2:482 (1981); the homology alignment algorithm of Needleman and Wunsch, J. Mol. Biol., 48:443 (1970); the search-for-similarity-method of Pearson and Lipman, Proc. Natl. Acad. Sci., 85:2444 (1988); the algorithm of Karlin and Altschul, Proc. Natl. Acad Sci. USA, 87:2264 (1990), modified as in Karlin and Altschul, Proc. Natl. Acad. Sci. USA, 90:5873 (1993).

[0112] Computer implementations of these mathematical algorithms can be utilized for comparison of sequences to determine sequence identity. Such implementations include, but are not limited to: CLUSTAL in the PC/Gene program (available from Intelligenetics, Mountain View, Calif.); the ALIGN program (Version 2.0) and GAP, BESTFIT, BLAST, FASTA, and TFASTA in the Wisconsin Genetics Software Package, Version 8 (available from Genetics Computer Group (GCG), 575 Science Drive, Madison, Wis., USA). Alignments using these programs can be performed using the default parameters. The CLUSTAL program is well described by Higgins et al., Gene, 73:237 (1988); Higgins et al., CABIOS, 5:151 (1989); Corpet et al., Nucleic Acids Res., 16:10881 (1988); Huang et al., CABIOS, 8:155 (1992); and Pearson et al., Meth. Mol. Biol., 24:307 (1994). The ALIGN program is based on the algorithm of Myers and Miller, supra. The BLAST programs of Altschul et al., J. Mol. Biol., 215:403 (1990), are based on the algorithm of Karlin and Altschul supra. To obtain gapped alignments for comparison purposes, Gapped BLAST (in BLAST 2.0) can be utilized as described in Altschul et al., Nucleic Acids Res., 25:3389 (1997). Alternatively, PSI-BLAST (in BLAST 2.0) can be used to perform an iterated search that detects distant relationships between molecules. See Altschul et al., supra. When utilizing BLAST, Gapped BLAST, PSI-BLAST, the default parameters of the respective programs (e.g. BLASTN for nucleotide sequences, BLASTX for proteins) can be used. The BLASTN program (for nucleotide sequences) uses as defaults a wordlength (W) of 11, an expectation (E) of 10, a cutoff of 100, M=5, N=−4, and a comparison of both strands. For amino acid sequences, the BLASTP program uses as defaults a wordlength (W) of 3, an expectation (E) of 10, and the BLOSUM62 scoring matrix (see Henikoff & Henikoff, Proc. Natl. Acad. Sci. USA 89, 10915 (1989)). See http://www.ncbi.n1m.nih.gov. Alignment may also be performed manually by inspection.

[0113] For purposes of the present invention, comparison of polynucleic acid sequences for determination of percent sequence identity to the polynucleic acid segments disclosed herein is preferably made using the BlastN program (version 1.4.7 or later) with its default parameters or any equivalent program. By “equivalent program” is intended any sequence comparison program that, for any two sequences in question, generates an alignment having identical nucleotide or amino acid residue matches and an identical percent sequence identity when compared to the corresponding alignment generated by the preferred program.

[0114] (c) As used herein, “sequence identity” or “identity” in the context of two polynucleic acid or polypeptide sequences makes reference to the residues in the two sequences that are the same when aligned for maximum correspondence over a specified comparison window. When percentage of sequence identity is used in reference to proteins it is recognized that residue positions which are not identical often differ by conservative amino acid substitutions, where amino acid residues are substituted for other amino acid residues with similar chemical properties (e.g., charge or hydrophobicity) and therefore do not change the functional properties of the molecule. When sequences differ in conservative substitutions, the percent sequence identity may be adjusted upwards to correct for the conservative nature of the substitution. Sequences that differ by such conservative substitutions are said to have “sequence similarity” or “similarity.” Means for making this adjustment are well known to those of skill in the art. Typically this involves scoring a conservative substitution as a partial rather than a full mismatch, thereby increasing the percentage sequence identity. Thus, for example, where an identical amino acid is given a score of 1 and a non-conservative substitution is given a score of zero, a conservative substitution is given a score between zero and 1. The scoring of conservative substitutions is calculated, e.g., as implemented in the program PC/GENE (Intelligenetics, Mountain View, Calif.).

[0115] (d) As used herein, “percentage of sequence identity” means the value determined by comparing two optimally aligned sequences over a comparison window, wherein the portion of the polynucleotide sequence in the comparison window may comprise additions or deletions (i.e., gaps) as compared to the reference sequence (which does not comprise additions or deletions) for optimal alignment of the two sequences. The percentage is calculated by determining the number of positions at which the identical nucleic acid base or amino acid residue occurs in both sequences to yield the number of matched positions, dividing the number of matched positions by the total number of positions in the window of comparison, and multiplying the result by 100 to yield the percentage of sequence identity.

[0116] (e)(i) The term “substantial identity” of polynucleotide sequences means that a polynucleotide comprises a sequence that has at least 70%, preferably at least 80%, more preferably at least 90%, and most preferably at least 95%, sequence identity, and single unit percentage identities based on these classes. For example 71%, 72%, 73% and the like, up through at least the 95% class as compared to a reference sequence using one of the alignment programs described using standard parameters. One of skill in the art will recognize that these values can be appropriately adjusted to determine corresponding identity of proteins encoded by two nucleotide sequences by taking into account codon degeneracy, amino acid similarity, reading frame positioning, and the like. Substantial identity of amino acid sequences for these purposes normally means sequence identity of at least 70%, more preferably at least 80%, 90%, and most preferably at least 95%.

[0117] Another indication that nucleotide sequences are substantially identical is if two molecules hybridize to each other under stringent conditions. Generally, stringent conditions are selected to be about 5° C. lower than the thermal melting point (Tₘ) for the specific sequence at a defined ionic strength and pH. However, stringent conditions encompass temperatures in the range of about 1° C. to about 20° C., depending upon the desired degree of stringency as otherwise qualified herein. Nucleic acids that do not hybridize to each other under stringent conditions are still substantially identical if the polypeptides they encode are substantially identical. This may occur, e.g., when a copy of a nucleic acid is created using the maximum codon degeneracy permitted by the genetic code. One indication that two nucleic acid sequences are substantially identical is when the polypeptide encoded by the first nucleic acid is immunologically cross reactive with the polypeptide encoded by the second nucleic acid.

[0118] (e)(ii) The term “substantial identity” in the context of a peptide indicates that a peptide comprises a sequence with at least 70%, preferably at least 80%, more preferably at least 90%, and most preferably at least 95%, sequence identity, and single unit percentage identities based on these classes. For example 71%, 72%, 73% and the like, up through at least the 95% class as compared to a reference sequence over a specified comparison window. Preferably, optimal alignment is conducted using the homology alignment algorithm of Needleman and Wunsch J. Mol. Biol., 48:443, (1970). An indication that two peptide sequences are substantially identical is that one peptide is immunologically reactive with antibodies raised against the second peptide. Thus, a peptide is substantially identical to a second peptide, for example, where the two peptides differ only by a conservative substitution.

[0119] “Specific expression” is the expression of gene products which is limited to one or a few plant tissues (spatial limitation) and/or to one or a few plant developmental stages (temporal limitation). It is acknowledged that hardly a true specificity exists: promoters seem to be preferably switch on in some tissues, while in other tissues there can be no or only little activity. This phenomenon is known as leaky expression. However, with specific expression in this invention is meant preferable expression in one or a few plant tissues.

[0120] “Stably transformed” refers to cells that have been selected and regenerated on a selection media following transformation.

[0121] The term “substantially similar” refers to nucleotide and amino acid sequences that represent equivalents of the instant inventive sequences. For example, altered nucleotide sequences which simply reflect the degeneracy of the genetic code but nonetheless encode amino acid sequences that are identical to the inventive amino acid sequences are substantially similar to the inventive sequences. In addition, amino acid sequences that are substantially similar to the instant sequences are those wherein overall amino acid identity is 95% or greater to the instant sequences. Modifications to the instant invention that result in equivalent nucleotide or amino acid sequences is well within the routine skill in the art. Moreover, the skilled artisan recognizes that equivalent nucleotide sequences encompassed by this invention can also be defined by their ability to hybridize, under stringent conditions (0.1×SSC, 0.1% SDS, 65° C.), with the nucleotide sequences that are within the literal scope of the instant claims.

[0122] “Substantially the same activity” when used in reference to a fragment of a polypeptide or polynucleotide means that the fragment has at least 50%, more preferably at least 80%, even more preferably at least 90% to 95%, and still more preferably at least 95%, including 100%, of the activity of the full-length polypeptide.

[0123] “Target gene” refers to a gene on the replicon that expresses the desired target coding sequence, functional RNA, or protein. The target gene is not essential for replicon replication. Additionally, target genes may comprise native non-viral genes inserted into a non-native organism, or chimeric genes, and will be under the control of suitable regulatory sequences. Thus, the regulatory sequences in the target gene may come from any source, including the virus. Target genes may include coding sequences that are either heterologous or homologous to the genes of a particular plant to be transformed. However, target genes do not include native viral genes. Typical target genes include, but are not limited to genes encoding a structural protein, a seed storage protein, a protein that conveys herbicide resistance, and a protein that conveys insect resistance. Proteins encoded by target genes are known as “foreign proteins”. The expression of a target gene in a plant will typically produce an altered plant trait.

[0124] “3′ non-coding sequence” refers to nucleotide sequences located 3′ (downstream) to a coding sequence and include polyadenylation signal sequences and other sequences encoding regulatory signals capable of affecting mRNA processing or gene expression. The polyadenylation signal is usually characterized by affecting the addition of polyadenylic acid tracts to the 3′ end of the mRNA precursor. The use of different 3′ non-coding sequences is exemplified by Ingelbrecht et al., Plant Cell, 1:671 (1989).

[0125] “Tissue-specific promoter” refers to regulated promoters that are not expressed in all plant cells but only in one or more cell types in specific organs (such as leaves or seeds), specific tissues (such as embryo or cotyledon), or specific cell types (such as leaf parenchyma or seed storage cells). These also include promoters that are temporally regulated, such as in early or late embryogenesis, during fruit ripening in developing seeds or fruit, in fully differentiated leaf, or at the onset of senescence.

[0126] The terms “trans-acting sequence” and “trans-acting element” refer to DNA or RNA sequences whose function does not require them to be on the same molecule. Examples of trans-acting sequence is the replication gene (ACI or AL1 in ACMV or TGMV geminiviruses, respectively), that can function in replication without being on the replicon.

[0127] “Transactivating gene” refers to a gene encoding a transactivating protein. It can encode a viral replication protein(s) or a site-specific replicase. It can be a natural gene, for example, a viral replication gene, or a chimeric gene, for example, when plant regulatory sequences are operably-linked to the open reading frame of a site-specific recombinase or a viral replication protein. “Transactivating genes” may be chromosomally integrated or transiently expressed.

[0128] “Transcription Stop Fragment” refers to nucleotide sequences that contain one or more regulatory signals, such as polyadenylation signal sequences, capable of terminating transcription. Examples include the 3′ non-regulatory regions of genes encoding nopaline synthase and the small subunit of ribulose bisphosphate carboxylase.

[0129] The term “transformation” refers to the transfer of a nucleic acid fragment into the genome of a host cell, resulting in genetically stable inheritance. Host cells containing the transformed nucleic acid fragments are referred to as “transgenic” cells, and organisms comprising transgenic cells are referred to as “transgenic organisms”. Examples of methods of transformation of plants and plant cells include Agrobacterium-mediated transformation (De Blaere et al., Meth. Enzymol., 143:277 (1987)) and particle bombardment technology (Klein et al., (1987) Nature (London), 327:70 (1987); U.S. Pat. No. 4,945,050). Whole plants may be regenerated from transgenic cells by methods well known to the skilled artisan (see, for example, Fromm et al., Bio/Technology, 8:833 (1990)).

[0130] “Transformed,” “transgenic,” and “recombinant” refer to a host organism such as a bacterium or a plant into which a heterologous nucleic acid molecule has been introduced. The nucleic acid molecule can be stably integrated into the genome by methods generally known in the art which are disclosed in Sambrook et al., Molecular Cloning: A Laboratory Manual (2d ed., Cold Spring Harbor Laboratory Press, Plainview, N.Y.) (1989). For example, “transformed,” “transformant,” and “transgenic” plants or calli have been through the transformation process and contain a foreign gene integrated into their chromosome. The term “untransformed” refers to normal plants that have not been through the transformation process.

[0131] A “transgene” refers to a gene that has been introduced into the genome by transformation and is stably maintained. Transgenes may include, for example, genes that are either heterologous or homologous to the genes of a particular plant to be transformed. Additionally, transgenes may comprise native genes inserted into a non-native organism, or chimeric genes. The term “endogenous gene” refers to a native gene in its natural location in the genome of an organism. A “foreign” gene refers to a gene not normally found in the host organism but that is introduced by gene transfer.

[0132] “Transgene activation system” refers to the expression system comprised of an inactive transgene and a chimeric site-specific recombinase gene, functioning together, to effect transgene expression in a regulated manner. The specificity of the recombination will be determined by the specificity of regulated promoters as well as the use of wild-type or mutant site-specific sequences. Both elements of the system can be chromosomally integrated and inherited independently. Such site specific sequences are well known in the art, see for example the Cre-Lox system (U.S. Pat. No. 4,959,317) as well as the FLP/FRT site-specific recombination system. Lyznik et al., Nucleic Acids Res., 21:969 (1993).

[0133] A “transgenic plant” is a plant having one or more plant cells that contain a heterologous DNA sequence.

[0134] “Transient expression” refers to expression in cells in which a virus or a transgene is introduced by viral infection or by such methods as Agrobacterium-mediated transformation, electroporation, or biolistic bombardment, but not selected for its stable maintenance.

[0135] “Transiently transformed” refers to cells in which transgenes and foreign DNA have been introduced (for example, by such methods as Agrobacterium-mediated transformation or biolistic bombardment), but not selected for stable maintenance.

[0136] The term “translation leader sequence” refers to that DNA sequence portion of a gene between the promoter and coding sequence that is transcribed into RNA and is present in the fully processed mRNA upstream (5′) of the translation start codon. The translation leader sequence may affect processing of the primary transcript to mRNA, mRNA stability or translation efficiency.

[0137] “Translation Stop Fragment” refers to nucleotide sequences that contain one or more regulatory signals, such as one or more termination codons in all three frames, capable of terminating translation. Insertion of a translation stop fragment adjacent to or near the initiation codon at the 5′ end of the coding sequence will result in no translation or improper translation. Excision of the translation stop fragment by site-specific recombination will leave a site-specific sequence in the coding sequence that does not interfere with proper translation using the initiation codon.

[0138] By “variant” polypeptide is intended a polypeptide derived from the native protein by deletion (so-called truncation) or addition of one or more amino acids to the N-terminal and/or C-terminal end of the native protein; deletion or addition of one or more amino acids at one or more sites in the native protein; or substitution of one or more amino acids at one or more sites in the native protein. Such variants may results form, for example, genetic polymorphism or from human manipulation. Methods for such manipulations are generally known in the art.

[0139] Thus, the polypeptides of the invention may be altered in various ways including amino acid substitutions, deletions, truncations, and insertions. Methods for such manipulations are generally known in the art. For example, amino acid sequence variants of the polypeptides can be prepared by mutations in the DNA. Methods for mutagenesis and nucleotide sequence alterations are well known in the art. See, for example, Kunkel, Proc. Natl. Acad. Sci. USA, 82, 488 (1985); Kunkel et al., Methods in Enzymol., 154:367 (1987); U. S. Pat. No. 4,873,192; Walker and Gaastra, eds., Techniques in Molecular biology, MacMillan Publishing Company, New York (1983) and the references cited therein. Guidance as to appropriate amino acid substitutions that do not affect biological activity of the protein of interest may be found in the model of Dayhoff et al., Atlas of Protein Sequence and Structure, Natl. Biomed. Res. Found., Washington, C. D. (1978), herein incorporated by reference. Conservative substitutions, such as exchanging one amino acid with another having similar properties, are preferred.

[0140] Thus, the genes and nucleotide sequences of the invention include both the naturally occurring sequences as well as mutant forms. Likewise, the polypeptides of the invention encompass both naturally occurring proteins as well as variations and modified forms thereof. Such variants will continue to possess the desired activity. The deletions, insertions, and substitutions of the polypeptide sequence encompassed herein are not expected to produce radical changes in the characteristics of the polypeptide. However, when it is difficult to predict the exact effect of the substitution, deletion, or insertion in advance of doing so, one skilled in the art will appreciate that the effect will be evaluated by routine screening assays.

[0141] The nucleic acid molecules of the invention can be optimized for enhanced expression in plants of interest. See, for example, EPA035472; WO91/16432; Perlak et al., Proc. Natl. Acad. Sci. USA, 88:3324 (1991); and Murray et al., Nucleic Acids Res., 17:477 (1989). In this manner, the genes or gene fragments can be synthesized utilizing plant-preferred codons. See, for example, Campbell and Gowri, Plant Physiol., 92:1 (1990) for a discussion of host-preferred codon usage. Thus, the nucleotide sequences can be optimized for expression in any plant. It is recognized that all or any part of the gene sequence may be optimized or synthetic. That is, synthetic or partially optimized sequences may also be used. Variant nucleotide sequences and proteins also encompass sequences and protein derived from a mutagenic and recombinogenic procedure such as DNA shuffling. With such a procedure, one or more different coding sequences can be manipulated to create a new polypeptide possessing the desired properties. In this manner, libraries of recombinant polynucleotides are generated from a population of related sequence polynucleotides comprising sequence regions that have substantial sequence identity and can be homologously recombined in vitro or in vivo. Strategies for such DNA shuffling are known in the art. See, for example, Stemmer, Proc. Natl. Acad. Sci. USA, 91:10747 (1994); Stemmer, Nature, 370:389 (1994); Crameri et al., Nature Biotech., 15:436 (1997); Moore et al., J. Mol. Biol., 272:336 (1997); Zhang et al., Proc. Natl. Acad. Sci. USA, 94:4504 (1997); Crameri et al., Nature, 391:288 (1998); and U.S. Pat. Nos. 5,605,793 and 5,837,458.

[0142] By “variants” is intended substantially similar sequences. For nucleotide sequences, variants include those sequences that, because of the degeneracy of the genetic code, encode the identical amino acid sequence of the native protein. Naturally occurring allelic variants such as these can be identified with the use of well-known molecular biology techniques, as, for example, with polymerase chain reaction (PCR) and hybridization techniques. Variant nucleotide sequences also include synthetically derived nucleotide sequences, such as those generated, for example, by using site-directed mutagenesis which encode the native protein, as well as those that encode a polypeptide having amino acid substitutions. Generally, nucleotide sequence variants of the invention will have at least 40%, 50%, 60%, preferably 70%, more preferably 80%, even more preferably 90%, most preferably 99%, and single unit percentage identity to the native nucleotide sequence based on these classes. For example, 71%, 72%, 73% and the like, up to at least the 90% class. Variants may also include a full length gene corresponding to an identified gene fragment.

[0143] “Vector” is defined to include, inter alia, any plasmid, cosmid, phage or Agrobacterium binary vector in double or single stranded linear or circular form which may or may not be self transmissible or mobilizable, and which can transform prokaryotic or eukaryotic host either by integration into the cellular genome or exist extrachromosomally (e.g. autonomous replicating plasmid with an origin of replication).

[0144] Specifically included are shuttle vectors by which is meant a DNA vehicle capable, naturally or by design, of replication in two different host organisms, which may be selected from actinomycetes and related species, bacteria and eukaryotic (e.g. higher plant, mammalian, yeast or fungal cells). Preferably the nucleic acid in the vector is under the control of, and operably linked to, an appropriate promoter or other regulatory elements for transcription in a host cell such as a microbial, e.g. bacterial, or plant cell. The vector may be a bi-functional expression vector which functions in multiple hosts. In the case of genomic DNA, this may contain its own promoter or other regulatory elements and in the case of cDNA this may be under the control of an appropriate promoter or other regulatory elements for expression in the host cell.

[0145] “Wild-type” refers to the normal gene, virus, or organism found in nature without any known mutation.

### BRIEF DESCRIPTION OF THE FIGURES AND SEQUENCES

[0146] Figures:

[0147] FIG. 1 shows the insertion of the GFP expression cassette into the GAL polylinker of pBIN19.

[0148] Sequence Listing:

[0149] SEQ ID NOs: 1 to 342 provide the rice polynucleotide sequences according to the invention and the protein sequences which are encoded by the said polynucleotides in an alternating arrangement. The nucleic acid sequences are represented by the odd SEQ ID NOs: 1, 3, 5 . . . , and so on up to SEQ ID NO: 341, and the polypeptide sequences by the even SEQ ID NOs: 2, 4, 6, . . . and so on up to SEQ ID NO: 342, with the respective polypepdide immediately following its corresponding nucleic acid.

[0150] SEQ ID NOs: 343 to 472 provide rice cDNA sequences.

[0151] SEQ ID NOs: 473 to 539 provide banana cDNA/EST sequences which show homology to the rice sequences according to the invention.

[0152] SEQ ID NOs: 540 to 673 provide wheat cDNA/EST sequences which show homology to the rice sequences according to the invention.

[0153] SEQ ID NOs: 674 to 779 provide maize cDNA/EST sequences which show homology to the rice sequences according to the invention.

### DETAILED DESCRIPTION OF THE INVENTION

[0154] The elucidation of gene silencing mechanisms can lead to more efficiently expressed transgenes. It will also lead to a better understanding of plant-viral interactions, and to new methods of targeting the suppression of specific plant genes.

[0155] To identify genes important for posttranscriptional gene silencing (PTGS), the RNA expression patterns in high-expressing and silent Arabidopsis plants may be compared using DNA microarray technology. Arabidopsis plants transformed with a green fluorescent protein (GFP) reporter gene regulated by the cauliflower mosaic virus 35S RNA promoter (P35S) are used as the inhibition of GFP accumulation is a marker for PTGS. This system has the advantage that expression of the foreign GFP gene has little effect on the physiology of the plant. Accordingly, use of this method greatly increases the range of PTGS-related genes that can be identified. Use of this system also provides nucleic acid segments and corresponding polypeptides that are modulated by PTGS.

[0156] Several candidate proteins have recently been reported. A RecQ DNA helicase that is required for gene silencing in Neurospora has recently been described (Cogoni et al., Science 286:2342 (1999)). The DNA helicase may act by unwinding DNA, inducing changes in DNA methylation or chromatin structure that could result in the production of aberrant RNA. Another candidate is rgs-CaM, a calmodulin-related protein that suppresses plant post-transcriptional gene silencing. The involvement of this protein suggests that gene silencing may be regulated by Ca⁺⁺ binding activity (Anandalakshmi et al., Science 290:142 (2000). Another suggested candidate is RNA-dependent RNA polymerase, which might serve to produce antisense RNAs from sense transcripts (Jorgensen et al., Science 279 1486 (1998)). Since gene silencing is also induced by RNA viruses and involves aberrant DNA methylation, future research will involve overexpression or underexpression of candidate proteins combined with the use of the powerful research tools such as viral suppressors of gene silencing (Jones et al., Plant Cell 11:2291 (1999)).

[0157] The invention discloses a method to identify cell expression products that are modulated by posttranscriptional gene silencing (PTGS) and the products identified through use of the method. The invention further discloses a method of determining the siliencing status of a plant. Any one of the genes disclosed herein, but, preferably, subsets of genes comprising at least two or more genes the expression of which is modulated by gene silencing, can be used in said method.

[0158] Preferred subsets of genes that may be used in a method of determining the siliencing status of a plant comprise polynucleotides encoding polypeptides that are involved in RNA and DNA metabolism (e.g., RNA helicases, RNAses, reverse transcriptase, histones, histone acetyltransferases); signal transduction (e.g., protein kinases, receptors, and calmodulin); further transcription factors and biotic and abiotic stress-related proteins; and proteins involved in general metabolism.

[0159] Preferred is a subset of genes comprising polynucleotides encoding polypeptides that are involved in RNA and DNA metabolism and have at least 70% nucleotide sequence identity to the polynucleotides selected from the group consisting of SEQ ID NOs: 278, 92; 152, 142, and 244.

[0160] Further preferred is a subset of genes comprising polynucleotides encoding polypeptides that are involved in signal transduction and have at least 70% nucleotide sequence identity to the polynucleotides selected from the group consisting of SEQ ID NOs: 252, 4, 289, 55, 312, 40; 338; 132; and 180.

[0161] Also preferred is a subset of genes comprising polynucleotides encoding DNA-binding proteins and having at least 70% nucleotide sequence identity to the polynucleotides selected from the group consisting of SEQ ID NOs: 196, 64; 328, 140; 66, 264; 280, 198; 176, 22; 318, 58; 216, 116; 152, 142; 162, 46, 270, 12, 20, 200, 304 and 188.

[0162] Also preferred is a subset of genes comprising polynucleotides encoding polypeptides that are involved in the biotic and abiotic stress response of plants and have at least 70% nucleotide sequence identity to the polynucleotides selected from the group consisting of SEQ ID NOs: 174; 234; 18; 226, 68; 32, 182; 168, 60; 212, 72; 184, 108; 230, 42; 38, 322; 178, 24; 86; 204; 146; 320, 16, 316, 110, 106, 222, 238, 282, 102, 150, 94, and 186.

[0163] Further preferred is a subset of genes comprising polynucleotides encoding polypepetides with yet an unknown function and having at least 70% nucleotide sequence identity to the polynucleotides selected from the group consisting of SEQ ID NOs: 310, 30; 160, 50; 284; 296, 122; 242, 6; 164, 130; 280, 78; 218, 118; 336; 220, 76; 156, and 342.

[0164] The method according to the invention comprises obtaining the RNA expression profile for a gene or, preferably, a subset of genes the expression of which is modulated by posttranscriptional gene silencing (PTGS) and comparing the so obtained expression profile with the profile of a plant of the same species that does not have posttranscriptional gene silencing.

[0165] For determining the silencing status of a plant the expression profile of a single gene known to be modulated by PTGS may be obtained, but preferably of a group of 2, 3, 4, 5 and up to 20 and more genes. The said genes are preferably those provided in the above-defined subgroups with any combination of genes within said subgroups also being part of the invention.

[0166] In a further embodiment of the invention newly arranged subsets of genes may be used within the method according to the invention comprising 2, 3, 4, 5 and up to 20 and more genes obtained from two or more of the above defined subgroups.

[0167] The above methods involve comparing the contents of a cell that has posttranscriptional gene silencing with the contents of a cell of the same species that does not have posttranscriptional gene silencing. Cells which exhibit, and which do not exhibit, posttranscriptional gene silencing may be identified through use of a marker gene that is operatively linked to a constitutive promoter. One non-limiting example of such a marker gene is green fluorescent protein (GFP). Preferably the marker gene has little physiological effect on the cell. Cells exhibiting posttranscriptional gene silencing may be identified by inhibited accumulation of the marker gene product (i.e. GFP). This method can be adapted for use with many cells and it is understood that the exemplary use of Arabidopsis disclosed in the present invention is not to be limiting in any way. Preferably the method can be used with plant cells. More preferably the method can be used with the cells of plants used in agriculture. Most preferably the method can be used with the cells of commercial plants such as rice.

[0168] In one embodiment of the invention two cells of the same species, one which exhibits PTGS and one which does not, are grown under the same conditions. Plant tissues are collected and RNA is extracted through use of a method or methods known in the art and used to prepare biotinylated cRNA probes (Sambrook et al.,1989; Example II; http://afgc.stanford.edu/afgc, htm1/site2Rna.htm#pinetree). Briefly, RNA can be prepared through use of an RNeasy column and then precipitated overnight at −20° C. after the addition of 0.25 volumes of 10M LiCl₂ and pelleting by centrifugation. The pellet is washed with 70% EtOH, air dried and resuspended in RNase-free (DEPC-treated) water. The RNA produced is used to prepare cDNA by annealing an oligo dT₍₂₄₎ primer, containing a 5′ T7 RNA polymerase promoter sequence, to RNA isolated from plant tissue and adding reverse transcriptase to cause first strand cDNA synthesis. Second strand cDNA synthesis can then be performed using E. coli DNA polymerase, ligase and RNase H. The cDNA products are then purified by phenol/chloroform extraction and EtOH precipitation. Biotinylated cRNA probes can be prepared through in vitro transcription using T7 RNA polymerase (ENZO BioArray High Yield RNA Transcript Labeling Kit).

[0169] The biotinylated probes may then be fragmented through chemical or mechanical means and annealed to a oligonucleotide array (see Example II). The array may then be scanned with a Hewlett-Packard GeneArray scanner and the expression level of the individual genes contained on the array (Affymetrix, Santa Clara, Calif.) is determined and compared to determine genes modulated by posttranscriptional gene silencing.

[0170] In another embodiment, cDNA-AFLP (complimentary deoxyribonucleic acid-amplified fragment length polymorphism) can be used to identify nucleic acid sequences modulated by posttranscriptional gene silencing within a cell. Durrant et al., The Plant Cell, 12:963 (2000). Briefly, total RNA is extracted from the tissues of at least two cells, as described above, and further purified with an mRNA purification system to isolate polyA-mRNA (Oligotex mRNA purification system, Qiagen Inc., Valencia, Calif.). PolyA-mRNA may also be isolated according to other methods well known in the art (Sambrook et al., 1989). However, total RNA may also be used in lieu of mRNA. The isolated mRNA is used to generate cDNA through methods well known in the art (Life Technologies, Rockville, Md.). Briefly, an oligo(dT) primer may be annealed to the mRNA and first strand cDNA synthesis reactions can be performed with SuperScript II reverse transcriptase (RT) (Gibco/BRL) according to the manufacturer's recommendations using 50 mM Tris-HCl (pH 8.3), 75 mM KCl, 3mM MgCl₂, 10 mM dithiotreitol (DTT), 0.5 mM dNTPs, and 200 units of RT enzyme. The second cDNA strand may be synthesized using 40 units of E. coli DNA polymerase, 10 units of E. coli ligase, and 2 units of RNase H in a reaction containing 25 mM Tris-HCl (pH 7.5), 100 mM KCl, 5 mM MgCl₂, 10 mM (NH₄)SO₄, 0.15 mM β-NAD⁺, 1 mM dNTPs, and 1.2 mM DTT. The reaction proceeds at 16° C. for 2 hours and is terminated with EDTA. Double-stranded cDNA products may be purified by phenol/chloroform extraction and ethanol precipitation.

[0171] The cDNA is digested with two different restriction enzymes and linkers having complimentary ends are ligated onto the ends of the digested cDNA fragment. Two primers are combined with the ligated cDNA product. Each of the primers anneals to each of the linkers that were ligated to the cDNA fragment such that a PCR reaction carried on between the two annealed primers will amplify the intervening sequence corresponding to that of the cDNA fragment.

[0172] The products of the PCR reaction can be separated on a polyacrylamide gel and the products quantitated through means well known in the art. Examples of such means are labeling of the products with fluorescent tags, radioactivity, antibody based systems or the like. This is followed by use of a fluorescence scanner, autoradiography or other detection method known in the art (Sambrook et al., 1989; Applied Biosystems, Foster City, Calif.; Beckman Coulter, Fullerton, Calif.).

[0173] Sequences that are up-modulated or down-modulated by posttranscriptional gene silencing within a cell can be identified by comparing the intensity of a sequence from a cell having PTGS to that of a cell which does not have PTGS. Identified bands are then excised from the gel and sequenced. The determined sequence is then compared to known sequences or used as a probe to determine the full length sequence of a gene that is modulated by posttranscriptional gene silencing.

[0174] Additionally, differential display and cDNA fingerprinting can be used to identify genes modulated by posttranscriptional gene silencing. (CuraGen Corp., New Haven, Conn., Digital Gene Tech., LaJolla, Calif.; Liang et al., Science, 257:967 (1992)).

[0175] Furthermore, metabolic and protein profiling methods such as mass spectroscopy and 2-dimensional gel electrophoresis can be used to identify proteins that are modulated by PTGS. These proteins can then be sequenced and reverse genetics may be used to isolate the corresponding gene that is modulated by posttranscriptional gene silencing. Briefly, a polypeptide that is modulated by posttranscriptional gene silencing is isolated and the amino acid sequence is determined through methods known in the art, such as chemical cleavage (Edman degradation) or through protease based sequencing methods. A codon table and synthetic methods known in the art (Sambrook et al, 1989) can be used to prepare a probe that will anneal to the gene that encodes the polypeptide, thus allowing the gene to be isolated according to standard methods.

[0176] The Arabidopsis sequences can be compared to different sets or rice sequences to identify homologs. One such set may contain rice gene prediction mRNA sequences and another set may contain other rice cDNA ORF sequences. The comparison algorithm can then be used such as, for example, a translated BLAST search, tblastx. The BLAST results can be post processed using an appropriate software such as, for example, SCAN software with the default parameters. This processed data may then be parsed to retrieve the top rice hit based on E-value. These rice sequences can then be compared to sets of clustered cDNA's from other cereal species such as, for example, wheat and banana using the same software process to retrieve the top hits from each set.

[0177] Thus, the present invention, in an embodiment applicable to all of the above stated provisions, provides nucleotide sequences corresponding to genes modulated within a cell by posttranscriptional gene silencing from cereals, but especially from rice, representative examples of which are identified in Tables 1 and 2 and listed in the sequence listing encoding at least one polypeptide involved in transcriptional proteins and/or activities, as well as the polypeptide encoded thereby, or an antigene sequence thereof, which have numerous applications using techniques that are known to those skilled in the art of molecular biology, biotechnology, biochemistry, genetics, physiology or pathology. These techniques include the use of nucleotide molecules as hybridization probes, for chromosome and gene mapping, in PCR technologies, in the production of sense or antisense nucleic acids, in screening for new therapeutic molecules, in production of plants and seeds having desirable, inheritable, commercially useful phenotypes, or in discovery of inhibitory compounds.

[0178] In a further embodiment, the present invention provides the ability to modulate transcription, by over-expressing, under-expressing or knocking out one or more genes involved in transcription chaperones,DNA binding factors and transcription factors, chromatin modification, and gene silencing genes, or their gene products, in a host cell, preferably in a plant cell, in vitro or in planta. Expression vectors including at least one nucleotide sequence involved in said sequences, or its antigene, operably linked to at least one suitable promoter and/or regulatory sequence can be used to study the role of polypeptides encoded by said sequences, for example by transforming a host cell with said expression vector and measuring the effects of overexpression and underexpression of sequences.

[0179] In particular, the present invention also provides isolated polynucleotide segments that are modulated within a cell by posttranscriptional gene silencing. (see Tables 1-2). These segments include, but are not limited to, those polynucleotide segments corresponding to genes modulated within a cell by posttranscriptional gene silencing from cereals, but especially from rice, identified in Tables 1 and 2 and listed in the sequence listing and sequences having at least 70% nucleotide sequence identity to the polynucleotide segments listed in the sequence listing. The polynucleotide segments of the invention also include mutations of the sequences corresponding to genes modulated within a cell by posttranscriptional gene silencing from cereals, but especially from rice, identified in Tables 1 and 2 and listed in the sequence listing that encode for the same amino acids due to the degeneracy of the genetic code. For example, the amino acid threonine is encoded by ACU, ACC, ACA and ACG. It is intended that the invention includes all variations of the polynucleotide segments corresponding to genes modulated within a cell by posttranscriptional gene silencing from cereals, but especially from rice, identified in Tables 1 and 2 and in the sequence listing that encode for the same amino acids. Such mutations are known in the art (Watson et al, Molecular Biology of the Gene, Benjamin Cummings 1987). Mutations also include alteration of a polynucleotide segments to encode for conservative amino acid changes.

[0180] Such amino acid changes are exemplified by the following five groups which contain amino acids that are conservative substitutions for one another: Aliphatic: Glycine (G), Alanine (A), Valine (V), Leucine (L), Isoleucine (I); Aromatic: Phenylalanine (F), Tyrosine (Y), Tryptophan (W); Sulfur-containing: Methionine (M), Cysteine (C); Basic: Arginine (R), Lysine (K), Histidine (H); Acidic: Aspartic acid (D), Glutamic acid (E), Asparagine (N), Glutamine (Q). See also, Creighton, 1984. Thus, the genes and nucleotide sequences of the invention include both the naturally occurring sequences as well as mutant forms.

[0181] In a specific embodiment, the nucleic acid sequences of the invention encode polypeptides involved with silencing-related RNA and DNA metabolism (e.g., RNA helicases, RNAses, reverse transcriptase, histones, histone acetyltransferases); signal transduction (e.g., protein kinases, receptors, and calmodulin); transcription factors; stress-related and pathogen-related proteins; and general metabolism. More prefered are reverse transcribase-like protein and histone acetyltransferase-like protein.

[0182] Silencing-related RNA and DNA Metabolism (e.g., RNA Helicases, RNAses, Reverse Transcriptase, Histones, Histone Acetyltransferases)

[0183] In a further specific embodiment the invention relates to an isolated polynucleotide segment that is modulated within a cell by posttranscriptional gene silencing which polynucleotide sequence encodes a histone acetyltransferase-like protein but, preferably, a polynucleotide segment encoding a protein as given in any one of SEQ ID NOs: 278, 92; and 152, 142, respectively including sequences having at least 70% nucleotide sequence identity to the polynucleotide segments listed in the sequence listing.

[0184] Acetylation and deacetylation of histones is believed to be one important mechanism for the dynamic alteration of chromatin structure, which is affected by two enzyme activities, histone acetyltransferase (HAT) and histone deacetylase (HD). Biochemical studies have revealed a correlation between the level of histone acetylation and deacetylation with transcriptional activity and repression respectively. It is thought that the acetylation of nucleosomal histones induces an open chromatin conformation, which allows the transcription machinery access to promoters.

[0185] The basic element of chromatin is the nucleosome. Histones H4, H3, H2A and H2B form the core histone octamer by protein-protein interactions of their folded domains. The most strictly conserved parts of core histones are the N-terminal extensions, which protrude from the nuclesome and contain numerous amino acids that are subject to posttranslational acetylation. Histone acetyltransferases (HATs) transfer the acetyl moiety of acetyl-coenzyme A to the epsilon-amino group; this reaction is reverted by histone deacetylases (HDACs). The dynamic equilibrium of the acetylation/deacetylation reaction varies throughout the genome; some regions in chromatin undergo rapid acetylation/deacetylation, whereas others are fixed in a certain acetylation state without significant changes.

[0186] Hence, histone acetylation and deacetylation are considered fundamental regulatory mechanisms governing cell proliferation and differentiation transcriptional regulation including DNA replication, chromatin remodelling, DNA repair; etc (for reviews see Wade and Wolffe, Curr. Biol. 7:82-84, 1997; Wolffe, Nature 387:16-17, 1997).

[0187] In a further specific embodiment the invention relates to an isolated polynucleotide segment that is modulated within a cell by posttranscriptional gene silencing which polynucleotide sequence encodes a reverse transcriptase protein but, preferably, a polynucleotide segment encoding a protein as given in SEQ ID NO: 244 including sequences having at least 70% nucleotide sequence identity to the polynucleotide segments listed in the sequence listing.

[0188] Reverse transcriptase (RT) is a modular enzyme carrying polymerase and ribonuclease H (RNase H) activities in separable domains. Reverse transcriptase (RT) converts the single-stranded RNA genome of a retrovirus into a double-stranded DNA copy for integration into the host genome. This process requires ribonuclease H as well as RNA-and DNA-directed DNA polymerase activities. Retroviral RNase H is synthesised as part of the POL polyprotein that contains; an aspartyl protease, a reverse transcriptase, RNase H and integrase. POL polyprotein undergoes specific enzymatic cleavage to yield the mature proteins. Bacterial RNase H (catalyses endonucleolytic cleavage to 5′-phosphomonoester acting on RNA-DNA hybrids.

[0189] Signal Transduction (e.g. Protein Kinases, Receptors, and Calmodulin)

[0190] The present invention further provides at least one nucleotide sequence encoding at least one polypeptide involved in signal transduction including receptor proteins, second messengers and G proteins, or any antigene sequences thereof. Receptor proteins play a role in the initial perception of changes in abiotic and biotic environmental factors such as light, nutrient availability, drought, salt, and pathogen attack. Second messengers and mediator proteins are involved in the perception and transduction of many signals from the perception site (often the plasma membrane) to target sites in the cell. G proteins are involved in many diverse responses in both plants and animals, such as responses to transduction of blue light, red light, auxin, giberellin, and stomatal opening (Trewavas, Signal perception and transduction in Buchanan, supra). Thus, these key groups of proteins are critical regulators of signal systems in plants, and nucleotide sequences encoding at least one polypeptide involved in receptor proteins, second messengers and G proteins, as well as the polypeptide encoded thereby, or any antigene sequences thereof, are commercially useful materials that can be used to study these processes and to modify these processes to elicit desired changes.

[0191] In a preferred embodiment the present invention relates to an isolated polynucleotide segment that is modulated within a cell by posttranscriptional gene silencing which polynucleotide sequence encodes a calmodulin-related protein but, preferably, a polynucleotide segment encoding a protein as given in SEQ ID NO: 252 and 4, respectively including sequences having at least 70% nucleotide sequence identity to the polynucleotide segments listed in the sequence listing.

[0192] Calmodulin, the principle Ca-binding protein in plants, mediates the messenger function of Ca+ ions. This highly conserved, soluble protein is found in the cytosol of plants and animals. Once bound, the Ca-calmodulin complex binds to protein kinases, which are in turn activated. Although the function of calmodulin in plants has not been thoroughly investigated (Heldt (1999) supra), it is thought that the protein will occupy a similar role in both plant and animal cells. Recent studies have also shown that calcium may play an important role in gravitropic responses (Raven et al., (1999) supra; Perdue et al., Plant Physiology 86: 1276 (1988)) of shoots and roots.

[0193] Further preferred is an isolated polynucleotide segment that is modulated within a cell by posttranscriptional gene silencing which polynucleotide sequence encodes a protein that shows similarity to the calcium-binding protein annexin, but, preferably, a polynucleotide segment encoding a protein as given in SEQ ID NOs: 289 and 55, respectively including sequences having at least 70% nucleotide sequence identity to the polynucleotide segments listed in the sequence listing.

[0194] In another preferred embodiment the, the present invention relates to an isolated polynucleotide segment that is modulated within a cell by posttranscriptional gene silencing which polynucleotide sequence encodes a protein kinase, including a receptor-linked protein kinase, but preferably, a polynucleotide segment encoding a protein as given in any one of SEQ ID NOs: 312, 40; and, 338; 132; and 180, respectively including sequences having at least 70% nucleotide sequence identity to the polynucleotide segments listed in the sequence listing.

[0195] Receptor-linked protein kinases are responsible for regulating cell wall components and are involved in senescence and a host of other phytohormone and resistance factors. As such, they provide the potential to regulate fiber modifications and lysine-rich proteins in crop plants, and additionally pose application in the control of crops by regulating pollen and ovule development (PRK-1s). Receptor linked protein kinases have an extracellular ligand-binding domain, but only have one membrane spanning region (Trewavas, Signal perception and transduction, in Buchanan, supra). Additionally, they have a kinase activation site on the cytosolic side of the protein, which is putatively activated by ligand binding. The protein exists as a dimer, so the ligand-binding causes the cytosolic region of the dimers to come in close proximity and be activated and stabilized by phosphorylation. The activated receptor may be involved in the activation of other proteins.

[0196] DNA Binding Proteins/Transkription Factors

[0197] In another preferred embodiment, the present invention provides at least one nucleotide sequence encoding at least one regulator of transcription, including but not limited to transcription factors that modulate the level of transcription with respect to tissue specificity of transcription, transcriptional responses to particular environmental or nutritional factors, where such transcription factors may include but are not limited to, transcriptional activators, transinhibitors, repressors, co-repressors, gene activator proteins, integration host factors, and sigma factors.

[0198] In particular, the present Invention relates to at least one nucleotide sequence encoding at least one regulator of transcription as given in SEQ ID NOs:; 196, 64; 328, 140; 66, 264; 280, 198; 176, 22; 318, 58; 216, 116; 152, 142; 162, 46, 270, 12, 20, 200, 304 and 188 respectively including sequences having at least 70% nucleotide sequence identity to the polynucleotide segments listed in the sequence listing.

[0199] While many transcription factors bind to sites on DNA, not all transcription factors bind DNA directly. Some bind to another transcription factor or to a DNA-protein complex. Transcription factors that bind to other proteins can be isolated using a cross-linking agents or a two-hybrid “interaction trap” system. Transcription factors that bind specific DNA sequences can be isolated using affinity tags or specifically designed oligonucleotides to identify transcription factors in cell extracts and the DNA-protein complex isolated using gel-shift techniques and purified for PCR amplification. Transcription factors that directly bind DNA may bind to sites in promoter or enhancer regions, where the primary role of enhancers is not simply to provide additional transcription factors to facilitate formation of an active initiation complex but to relieve repression of weak promoters due to chromatin structure.

[0200] In a further embodiment, the nucleotide sequence of the present invention binds to, or encodes a polypeptide that can bind to, a key site in an operon, regulon or other target sequence to effect regulation of the expression and function of a group of coordinately regulated genes.

[0201] In particular, the present invention relates to an isolated polynucleotide segment that is modulated within a cell by posttranscriptional gene silencing which polynucleotide sequence encodes a DNA-binding protein including a RAV-like domain DNA-binding protein, but preferably, a polynucleotide segment encoding a protein as given in SEQ ID NO: 318 and 58, respectively including sequences having at least 70% nucleotide sequence identity to the polynucleotide segments listed in the sequence listing.

[0202] The RAV-like B3 domain DN-binding proteins belong to a family of plant transcription factors which have various roles in development. The aligned region corresponds the B3 DNA binding domain. This domain is found in VP1/AB13 transcription factors. Some proteins also have a second AP2 DNA binding domain AP2-domain such as RAV1 Q9ZWM9. (Kagaya et al., Nucleic Acids Res, 27:470-478 (1999); Ulmasov et al., Science, 276:1865-1868 (1997)).

[0203] Another embodiment of the invention relates to an isolated polynucleotide segment that is modulated within a cell by posttranscriptional gene silencing which polynucleotide sequence encodes a WRKY domain transcription factor, but preferably, to a polynucleotide segment encoding a protein as given in SEQ ID NO: 196 and 64, respectively including sequences having at least 70% nucleotide sequence identity to the polynucleotide segments listed in the sequence listing.

[0204] Several examples of agronomically important DNA-binding domains have been investigated. Plants are composed of various cell and tissue types, all of which require different gene expression patterns. Gene expression requirements will undoubtedly change throughout development of the plant, as a tissue moves through the stages of biogenesis, maturity, and senescence. The WRKY DNA binding domain has been characterized in a number of plants including rice, parsley, wild oat, sweet potato, turnip and cucumber, as well as Arabidopsis, in which 100 representatives have been found. The proteins of this domain belong to a broad class and are involved in processes as unrelated as hormonal regulation, sucrose related gene expression, trichome development, and defense mechanisms. One novel characteristic of this domain is the presence of a C2-H2 zinc finger that has a distinctive spacing between the histidine and cysteine residues. In spite of the overall diversity of protein structure in this group, and the possibility for equally diverse functions, the WRKY domain transcription factors are strongly implicated in the regulation of early defense-response genes, particularly with regard to fungal pathogens.

[0205] In another preferred embodiment the present invention relates to an isolated polynucleotide segment that is modulated within a cell by posttranscriptional gene silencing which polynucleotide sequence encodes a zinc finger-type protein such as the lsd1-type protein or the CCCH-type protein, but preferably, a polynucleotide segment encoding a protein as given in SEQ ID NOs: 152, 66, 20, 200, and 188 respectively including sequences having at least 70% nucleotide sequence identity to the polynucleotide segments listed in the sequence listing.

[0206] The Lsd-1 gene encodes a zinc finger protein and is involved in the regulation of cell death. It acts as a gatekeeper, or “negative regulator.” in the plant cell; that is, it keeps cell death turned off until it receives the right signalIn Arabidopsis, LSD1 is required to prevent the programmed cell death response characteristic of gene-for-gene resistance from spreading beyond the site of infection and killing the entire plant. It encodes a zinc-finger protein (Dietrich et al., Cell 88:685-694 (1997)).

[0207] Zinc finger domains are thought to be involved in DNA-binding, and exist as different types, depending on the positions of the cysteine residues. Proteins containing zinc finger domains of the C-x8-C-x5-C-x3-H type include zinc finger proteins from eukaryotes involved in cell cycle or growth phase-related regulation, e.g. human TIS11B (butyrate response factor 1), a probable regulatory protein involved in regulating the response to growth factors, and the mouse TTP growth factor-inducible nuclear protein, which has the same function. The mouse TTP protein is induced by growth factors. Another protein containing this domain is the human splicing factor U2AF 35 kD subunit, which plays a critical role in both constitutive and enhancer-dependent splicing by mediating essential protein-protein interactions and protein-RNA interactions required for 3′ splice site selection. It has been shown that different CCCH zinc finger proteins interact with the 3′ untranslated region of various mRNA. This type of zinc finger is very often present in two copies.

[0208] In still another preferred embodiment the present invention relates to an isolated polynucleotide segment that is modulated within a cell by posttranscriptional gene silencing which polynucleotide sequence encodes an AP2-domain transcription factor protein, but preferably, a polynucleotide segment encoding a protein as given in any one of SEQ ID NOs: 140, and 176, 22and 270, 12, respectively including sequences having at least 70% nucleotide sequence identity to the polynucleotide segments listed in the sequence listing.

[0209] This 60 amino acid residue AP2-domain can bind to DNA. This domain is plant specific. Members of this family are suggested to be related to pyridoxal phosphate-binding domains such as found in aminotran 2 Ethylene, chemically the simplest plant hormone, participates in a number of stress responses and developmental processes: e.g., fruit ripening, inhibition of stem and root elongation, promotion of seed germination and flowering, senescence of leaves and flowers, and sex determination. DNA sequence elements that confer ethylene responsiveness have been shown to contain two 11 bp GCC boxes, which are necessary and sufficient for transcriptional control by ethylene. Ethylene responsive element binding proteins (EREBPs) have now been identified in a variety of plants. The proteins share a similar domain of around 59 amino acids, which interacts directly with the GCC box in the ERE. (Ohme-takagi et al., Plant Cell, 7:173-182 (1995); Weigel, Plant Cell, 7:388-389 (1995); Mushegian et al., Genetics, 144:817-828 (1996)). In still another preferred embodiment the present invention relates to an isolated polynucleotide segment that is modulated within a cell by posttranscriptional gene silencing which polynucleotide sequence encodes an MADS-box transcription factor protein, but preferably, a polynucleotide segment encoding a protein as given in SEQ ID NOs: 304, and 162, 46, respectively including sequences having at least 70% nucleotide sequence identity to the polynucleotide segments listed in the sequence listing. Proteins belonging to the MADS family function as dimers, the primary DNA-binding element of which is an anti-parallel coiled coil of two amphipathic alpha-helices, one from each subunit. The DNA wraps around the coiled coil allowing the basic N-termini of the helices to fit into the DNA major groove. The chain extending from the helix N-termini reaches over the DNA backbone and penetrates into the minor groove. A 4-stranded, anti-parallel beta-sheet packs against the coiled-coil face opposite the DNA and is the central element of the dimerisation interface. The MADS-box domain is commonly found associated with K-box region.

[0210] Stress-related and Pathogen-related Proteins

[0211] In another preferred embodiment the present invention relates to an isolated polynucleotide segment that is modulated within a cell by posttranscriptional gene silencing which polynucleotide sequence encodes a protein that is involved in the plants response to biotic or abiotic stresses, but preferably, to a polynucleotide segment encoding a protein as given in any one of SEQ ID NOs: 174; 234; 18; 226, 68; 32, 182; 168, 60; 212, 72; 184, 108; 230, 42; 38,322; 178, 24; 86; 204; 146; 320, 16, 316, 110, 106, 222, 238, 282, 102, 150, 94, 235, 1, 316, 110, and 186 respectively including sequences having at least 70% nucleotide sequence identity to the polynucleotide segments listed in the sequence listing.

[0212] In a preferred embodiment, the present invention relates to an isolated polynucleotide segment that is modulated within a cell by posttranscriptional gene silencing which polynucleotide sequence encodes a cytochrome P450 protein, but preferably, to a polynucleotide segment encoding a protein as given in any one of SEQ ID NOs: 234, 32, 182;146, 282, and 102, respectively including sequences having at least 70% nucleotide sequence identity to the polynucleotide segments listed in the sequence listing. Cytochrome P450s are involved in the oxidative degradation of various compounds, and are particularly well known for their role in the degradation of environmental toxins and mutagens. Structure is mostly alpha, and binds a heme cofactor. The cytochrome P450 enzymes usually act as terminal oxidases in multicomponent electron transfer chains, called P450-containing monooxygenase systems. P450-containing monooxygenase systems primarily fall into two major classes: bacterial/mitochondrial (type I), and microsomal (type II). All P450 enzymes can be categorised into two main groups, the so-called B- and E-classes: P450 proteins of prokaryotic 3-component systems and fungal P450nor (CYP55) belong to the B-class; all other known P450 proteins from distinct systems are of the E-class. This family contains a number of subtypes of both B and E classes.

[0213] In another preferred embodiment, the present invention relates to an isolated polynucleotide segment that is modulated within a cell by posttranscriptional gene silencing which polynucleotide sequence encodes a glucanase or anendochitinase or a class I or IV chitinase, but, preferably, to a polynucleotide segment encoding a protein as given in any one of SEQ ID NOs: and 222, 106, 226, 68; 212, 72 and 238, respectively including sequences having at least 70% nucleotide sequence identity to the polynucleotide segments listed in the sequence listing.

[0214] Chitinases (EC 3.2.1.14) are enzymes that catalyze the hydrolysis of the beta-1,4-N-acetyl-D-glucosamine linkages in chitin polymers. From the view point of sequence similarity chitinases belong to either family 18 or 19 in the classification of glycosyl hydrolases. Chitinases of family 18 (also known as classes III or V) groups a variety of chitinases and other proteins. Site-directed mutagenesis experiments and crystallographic data, have shown that a conserved glutamate is involved in the catalytic mechanism and probably acts as a proton donor. This glutamate is at the extremity of the best conserved region in these proteins.

[0215] In still another preferred embodiment, the present invention relates to an isolated polynucleotide segment that is modulated within a cell by posttranscriptional gene silencing which polynucleotide sequence encodes an peroxidase protein, but, preferably, to a polynucleotide segment encoding a protein as given in any one of SEQ ID NOs: 314, 62; 18; 168, 60; 186; 320, and 16 including sequences having at least 70% nucleotide sequence identity to the polynucleotide segments listed in the sequence listing.

[0216] Peroxidases are haem-containing enzymes that use hydrogen peroxide as the electron acceptor to catalyse a number of oxidative reactions. Most haem peroxidases follow the reaction scheme in which the enzyme reacts with one equivalent of H₂O₂ to give [Fe⁴⁺═O]R′ (compound I). This is a two-electron oxidation/reduction reaction where H₂O₂ is reduced to water and the enzyme is oxidised. One oxidising equivalent resides on iron, giving the oxyferryl intermediate, while in many peroxidases the porphyrin (R) is oxidised to the porphyrin pi-cation radical (R′). Compound I then oxidises an organic substrate to give a substrate radical. Peroxidases are found in bacteria, fungi, plants and animals and can be viewed as members of a superfamily consisting of 3 major classes. Class I, the intracellular peroxidases, includes: yeast cytochrome c peroxidase (CCP), a soluble protein found in the mitochondrial electron transport chain, where it probably protects against toxic peroxides; ascorbate peroxidase (AP), the main enzyme responsible for hydrogen peroxide removal in chloroplasts and cytosol of higher plants, and bacterial catalase-peroxidases, exhibiting both peroxidase and catalase activities. It is thought that catalase-peroxidase provides protection to cells under oxidative stress. Class II consists of secretory fungal peroxidases: ligninases, or lignin peroxidases (LiPs), and manganese-dependent peroxidases (MnPs). These are monomeric glycoproteins involved in the degradation of lignin. In MnP, Mn (2+) serves as the reducing substrate. Class II proteins contain four conserved disulphide bridges and two conserved calcium-binding sites. Class III consists of the secretory plant peroxidases, which have multiple tissue-specific functions: e.g., removal of hydrogen peroxide from chloroplasts and cytosol; oxidation of toxic compounds; biosynthesis of the cell wall; defence responses towards wounding; indole-3-acetic acid (IAA) catabolism; ethylene biosynthesis; and so on. Class III proteins are also monomeric glycoproteins, containing four conserved disulphide bridges and two calcium ions, although the placement of the disulphides differs from class II enzymes. The crystal structures of a number of these proteins show that they share the same architecture—two all-alpha domains between which the haem group is embedded.

[0217] In still another preferred embodiment, the present invention relates to an isolated polynucleotide segment that is modulated within a cell by posttranscriptional gene silencing which polynucleotide sequence encodes germin oxalate oxidase protein, but, preferably, to a polynucleotide segment encoding a protein as given in SEQ ID NOs: 235 and 1, respectively, including sequences having at least 70% nucleotide sequence identity to the polynucleotide segments listed in the sequence listing.

[0218] Germin and its relatives from barley are cereal glycoproteins expressed during germination, they are oxalate oxidase enzymes EC:1.2.3.4. The three conserved histidine residues are the ligands for the active site metal, a single manganese atom. The enzyme is a homohexamer. The structure of this family is predicted to be a beta-barrel protein based on similarity to the known structures of related Seedstore 7s and Seedstore 11s. These storage proteins are duplicated versions of germin, ie they have two linked beta-barrels whereas germin has a single domain. This family is a member of the ‘cupin’ superfamily on the basis of their conserved barrel domain (‘cupa’ is the Latin term for a small barrel). Germins are a family of homopentameric cereal glycoproteins expressed during germination which may play a role in altering the properties of cell walls during germinative growth. It has been shown that wheat and barley germins act as oxalate oxidases (EC:1.2.3.4), an enzyme that catalyzes the oxidative degradation of oxalate to carbonate and hydrogen peroxide. Germins are highly similar to Slime mold spherulins 1a and 1b and Germin-like proteins from various plants.

[0219] In still another preferred embodiment, the present invention relates to an isolated polynucleotide segment that is modulated within a cell by posttranscriptional gene silencing which polynucleotide sequence encodes an taumatin-like protein, but, preferably, to a polynucleotide segment encoding a protein as given in any one of SEQ ID NOs: 316 and 110, respectively, including sequences having at least 70% nucleotide sequence identity to the polynucleotide segments listed in the sequence listing.

[0220] The sweet-tasting protein thaumatin is a soluble protein located in the cytoplasm of the fruit cells of the tropical monocotyledon plant Thaumatococcus danielli Benth.,. Thaumatin shares amino acid sequence similarity with osmotin and some pathogenesis-related proteins. All these proteins have sixteen conserved cysteine residues that form eight disulfur bonds and share similar secondary structure. Thaumatin-like proteins have been detected in a variety of higher plants and their expression has been reported not only in response to phytopathogen infection but also during flower development, and fruit ripening.

[0221] Proteins with Unknown Function

[0222] Another important group of proteins comprises those proteins for which no function could be identified yet.

[0223] Within the scope of the present invention it could be demonstrated that the expression of these proteins is modulated within a cell by posttranscriptional gene silencing. An isolated polynucleotide segment that is modulated within a cell by posttranscriptional gene silencing which polynucleotide sequence encodes a protein within this group is provided in any one of SEQ ID NOs: 310, 30; 160, 50; 284; 296, 122; 242, 6; 164, 130; 280, 78; 218, 118; 336; 220, 76; 156, and 342, respectively including sequences having at least 70% nucleotide sequence identity to the polynucleotide segments listed in the sequence listing. These and the other polynucleotide sequence according to the invention identified hereinbefore can be used in a method to modulate gene expression by posttranscriptional gene silencing. The method involves transforming a cell with a polynucleic acid segment according to the invention that modulates gene expression by posttranscriptional gene silencing.

[0224] In accordance with the present invention, polypeptides encoded by the polynucleic acid segments of the invention and variants thereof are provided. These polypeptides are exemplified by those encoded by the nucleic acid sequences corresponding to genes modulated within a cell by posttranscriptional gene silencing from cereals, but especially from rice, identified in Tables 1 and 2 and listed in the sequence listing, polypeptides encoded by nucleic acid sequences having at least 70% sequence identity to the sequences in the sequence listing and variants and mutants thereof.

[0225] The polypeptides of the invention may be altered in various ways including amino acid substitutions, deletions, truncations, and insertions. Methods for such manipulations are generally known in the art. Methods for mutagenesis and nucleotide sequence alterations are well known in the art. See, for example, Kunkel, Proc. Natl. Acad. Sci. USA, 82:488, (1985); Kunkel et al., Methods in Enzymol., 154:367 (1987); U.S. Pat. No. 4,873,192; Walker and Gaastra, eds. (1983) Techniques in Molecular Biology (MacMillan Publishing Company, New York) and the references cited therein. Guidance as to appropriate amino acid substitutions that do not affect biological activity of the protein of interest may be found in the model of Dayhoff et al. (1978) Atlas of Protein Sequence and Structure (Natl. Biomed.Res. Found., Washington, D.C.), herein incorporated by reference. Conservative substitutions may be preferred.

[0226] The proteins of the invention encompass both naturally occurring polypeptides as well as variants and modified forms thereof. Obviously, the mutations that will be made in the DNA encoding the mutation must not place the sequence out of reading frame and preferably will not create complementary regions that could produce secondary mRNA structure. See, EP Patent Application Publication No. 75,444.

[0227] The invention also provides a method to determine the sequence of one or more regulatory elements that modulate gene expression within a cell by posttranscriptional gene silencing. In one embodiment, a genomic library may be probed with a polynucleic acid segment that is known to be modulated by posttranscriptional gene silencing within the cell in order to isolate the regulatory element that modulates expression of the gene. This procedure may be done according to methods known in the art (Sambrook et al., 1989). In one example meant for illustration and not to be limiting in any way, a chromosomal library of rice may be probed with a polynucleic acid segment described by in the sequence listing according to known hybridization techniques. Briefly, a bacterial artificial chromosome library containing rice genomic DNA may be constructed according to known methods (Choi et al, Plant Mol. Biol. Rep., 13:124 (1995)). A library such as this contains E. coli carrying single copy bacterial artificial chromosomes into which rice genomic DNA has been inserted. These inserts are approximately 150 kb in length. Filters or other supports known in the art are inoculated with the bacteria of the library. Colonies are formed on the support and the bacteria are lysed with the DNA becoming fixed to the support. The support may then be probed with a polynucleic acid segment corresponding to a gene that is modulated by posttranscriptional gene silencing. The nucleotide sequence of such a polynucleic acid segment is provided in the sequence listing. The polynucleic acid segment to be used as a probe may be labeled with radioactivity or other means know in the art, such as fluorescent groups, that allow the location of the probe to be determined. The probe is added to the support onto which the rice genomic DNA is fixed and allowed to anneal to the complementary nucleic acid sequence. The identity of the specific bacterial clone containing the rice genomic DNA to which the probe annealed is determined from the position of the probe as determined by radiography or other methods. This allows the bacterial artificial chromosome to be isolated from the selected bacterial clone and sequenced to determine elements regulated in response to posttranscriptional gene silencing. The isolated elements may be inserted into a construct containing a reporter gene, such as chloramphenicol acetyl transferase (CAT), luciferase, 9-glucuronidase (GUS) or green fluorescent protein (GFP), and then introduced into an appropriate cell to confirm the regulatory role of the element. GUS expression vectors and GUS gene cassettes are available from Clonetech Laboratories, Inc., Palo Alto, Calif. while luciferase expression vectors and luciferase gene cassettes are available from Promega Corp. (Madison, Wis.).

[0228] In another example, thermal asymmetric interlaced polymerase chain reaction (TAIL-PCR) may be used to identify elements that regulate gene expression by posttranscriptional gene silencing. Terauchi et al., Mol. Gen. Genet., 263:554 (2000). Briefly, total genomic DNA is extracted from a plant using methods known in the art, such as the CTAB (cetlytrimethylammonium bromide) method (Murray et al., Nuc. Acid. Res., 8:4321 (1980)). A primer is obtained that specifically anneals to a rice gene that is modulated by posttranscriptional gene silencing, such as those described in the sequence listing, and a degenerate primer or primers are constructed that will anneal to random nucleic acid sequences. The primers are constructed such that a PCR reaction conducted with the specific primer and the degenerate primer will amplify the region 5′ to the gene that is modulated within a cell by posttranscriptional gene silencing. The fragment produced can then be inserted into a vector and sequenced according to methods known in the art. In this way, regulatory elements that are 5′ of the gene modulated within a plant cell by posttranscriptional gene silencing can be identified. This method can also be used for identification of elements located 3′ of the PTGS-modulated gene. The regulatory role of elements isolated in this manner can be inserted into a vector through methods known in the art and described above. Also, the role of the elements in controlling gene expression can be confirmed by inserting the regulatory element into a construct containing a reporter gene and an appropriate cell as previously described.

[0229] The invention provides a construct containing a regulatory element that modulates the expression of a gene within a cell by posttranscriptional gene silencing. The regulatory element may be isolated according to the method of the invention as described in section IX of the detailed description. The construct contains the regulatory element inserted into a vector such that the regulatory element controls the expression of an open reading frame that is operably linked to the regulatory element. Methods to construct such a construct are well known in the art and are described herein (Sambrook et al., 1989). Thus, the expression of virtually any nucleic acid sequence placed under the control of the regulatory element in the construct may be regulated by posttranscriptional gene silencing. It is contemplated that the construct may be used to confer desired properties onto the cell of a plant that may be regulated by posttranscriptional gene silencing. Such properties include, but are not limited to, herbicide resistance, drought resistance or other properties known or described herein.

[0230] The invention also provides a method to block expression of endogenous genes of agricultural and other interest by transforming plants with sense constructs, particularly stem loop structures or inverted repeats to generate dsRNA. (Hamilton et al., Plant J., 15:737 (1998); Smith et al., Nature, 407:319 (2000); Chuang and Meyerowitz, Proc. Natl. Acad. Sci., USA, 97:4985 (2000); Schweizer et al., Plant J., 24:895 (2000)). This method may be used with constructs having regulatable promotors that are spread systemically. Accordingly, the method may be used with transgenic plants having inducable PTGS. Additionally, regulatable PTGS may be used to silence transcriptional repressors to activate expression of a target gene.

[0231] Cells may be produced that contain genomic mutations or deletions in genes corresponding to the polynucleotide sequences linked to both ends of the intervening sequence of the mutagenesis cassette as described. The method utilizes homologous recombination between the corresponding sequences to replace a section of a gene within the genome of a cell with the intervening sequence of the mutagenesis cassette. Methods for creating such mutations or deletions are well known in the art. See for example, Miao et al., Plant J., 7, 359 (1995); Rikkenink et al., Curr. Genet., 25: 202 (1994). Briefly, a mutagenesis cassette is introduced into a cell according to methods known in the art, such as through use of a A. tumefaciens T-DNA replacement vector. Finnemann et al., Plant Mol. Biol., 35: 523 (1997); Gallego et al., Plant Mol. Biol., 39: 83 (1999). Upon introduction into the cell, the mutagenesis cassette is inserted into the chromosome by the endogenous recombination system of the cell.

[0232] The invention provides a method to identify expression products that interact with expression products that are modulated within a cell by posttranscriptional gene silencing. In one embodiment a nucleic acid sequence encoding an expression product that is modulated is inserted into a vector for use in a yeast two-hybrid system. Such methods are well known in the art. Chien et al., P.N.A.S. (USA), 88:9578 (1991); Fields and Song, Nature, 340:245 (1989); Fields and Sternglanz, Trends Genet., 10:286 (1994). Briefly, in this method a protein is fused to a DNA-binding domain (the bait) and another protein is fused to a domain that activates RNA polymerase (here called the prey). These two constructs are expressed in two different haploid yeast strains of opposite mating type (MATa and MAT∀). The strains are mated to determine if the two proteins interact. Mating occurs when haploid yeast strains of opposite mating type come into contact, and results in fusion of the two haploids to form a diploid yeast strain. Thus, an interaction can be determined by measuring activation of a two-hybrid reporter gene in the diploid strain. The construct containing the nucleic acid sequence that encodes the interacting polypeptide may then be isolated and sequenced to determine the identity of the interacting polypeptide.

[0233] In another embodiment, an expression product that is modulated within a cell by posttranscriptional gene silencing is fused to a marker polypeptide. Marker polypeptides are well known in the art and include, but are not limited to, such polypeptides as antibody epitopes or glutathione S-transferase (GST). Kaelin, W. G. et al., Cell, 70:351 (1992). For example, a nucleic acid sequence encoding an expression product that is modulated within a cell by posttranscriptional gene silencing is inserted into a vector such that a fusion protein with GST is expressed. Such vectors are well known in the art and are commercially available. (Pharmacia, Piscataway, N.J.). The fusion protein formed may then be used to form a complex with other interacting proteins. This interaction may occur in vivo or in vitro. The complex may then be isolated through use of antibodies specific to the GST portion of the fusion protein. Such antibodies are commercially available. (Pharmacia, Piscataway, N.J.). Alternatively, the complex containing the GST fusion protein may be isolated through use of a glutathione agarose column (Sigma G-4510) or through other methods known in the art. The identity of the interacting expression product may then be determined by methods known in the art, such as for example, peptide sequencing.

[0234] The invention provides nucleic acid sequences that are modulated by PTGS that hybridize to nucleic acid segments corresponding to those listed in the sequence listing under low stringency conditions. Also provided are nucleic acid sequences that encode polypeptides that are substantially similar to those encoded by nucleic acid segments that correspond to those listed in the sequence listing. These orthologs may be determined through comparison of nucleic acid sequences that are modulated within a cell by PTGS to other sequences. The other sequences may be held in a database such as that maintained by the National Center for Biotechnology Information or other searchable databases. The comparison may be made visually or through methods well known in the art. Such methods include, for example, Blast searches and searches of the Swiss Protein Data Bank that are described herein. These orthologs may be used to transform cells and thereby confer onto the cells desired properties. Such properties include modulation of gene expression through use of PTGS. The orthologs may be introduced into many types of cells that include plant and animal cells. Cells and methods to introduce and express nucleic acids are contained herein. The transformed cells can be grown to produce transgenic plants and animals according to methods well known in the art and described herein. Accordingly, transgenic plants, animals, and other organisms can be propogated and used to produce products from the transgenic plants, animals and other organisms. Such products include seeds, fruits, progeny, products of the progeny, and the transgenic plants, animals, or other organisms themselves.

[0235] Also provided by the invention are methods to manipulate nucleic acid sequences that are modulated within a cell in response to contact of a virus with the cell. These sequences include variants, complements, and orthologs of those listed in the sequence listing. The following examples are for illustration only and are not meant to be limiting in any way.

[0236] An example of such manipulation is “gene shuffling” which may be used to prepare recombinant polypeptides having a particular activity. (See, for example, Crameri et al., Nature, 391, 288 (1998); Patten et al., Curr. Op. Biotech., 8, 724 (1997), U.S. Pat. Nos. 5,837,458; 5,834,252; 5,830,727; 5,811,238; 5,605,793; 6,132,970; 6,180,406). Briefly, a nucleic acid sequence may be fragmented and then religated to produce a polynucleic acid having an altered sequence. This altered nucleic acid may then be expressed and polypeptides encoded by the altered nucleic acid segment may be identified.

[0237] In another example, a nucleic acid sequence of the invention may be mutagenized to produce a polypeptide exhibiting altered activity. Such mutagenesis methods are well known in the art and are described herein. Further, a nucleic acid sequence of the invention may be mutagenized and shuffled to produce polypeptides having altered activities. See for example, U.S. Pat. No. 6,180,406.

[0238] The invention also provides a computer readable medium having stored thereon a data structure containing nucleic acid sequences that are modulated within a cell by PTGS. These sequences have at least 70% sequence identity to a nucleic acid sequence selected from those sequences corresponding to genes modulated within a cell by posttranscriptional gene silencing from cereals, but especially from rice, wheat and banana, identified in Tables 1 and 2 and listed in the sequence listing, as well as complementary, ortholog, and variant sequences thereof. Storage and use of nucleic acid sequences on a computer readable medium is well known in the art. (See for example U.S. Pat. Nos. 6,023,659; 5,867,402; 5,795,716) Examples of such medium include, but are not limited to, magnetic tape, optical disk, CD-ROM, random access memory, volitile memory, non-volitile memory and bubble memory. Accordingly, the nucleic acid sequences contained on the computer readable medium may be compared through use of a module that receives the sequence information and compares it to other sequence information. Examples of other sequences to which the nucleic acid sequences of the invention may be compared include those maintained by the National Center for Biotechnology Information (NCBI)(http://www.ncbi.nlm.nih.gov/) and the Swiss Protein Data Bank. A computer is an example of such a module that can read and compare nucleic acid sequence information. Accordingly, the invention also provides the method of comparing a nucleic acid sequence of the invention to another sequence. For example, a sequence of the invention may be submitted to the NCBI for a Blast search as described herein where the sequence is compared to sequence information contained within the NCBI database and a comparison is returned. The invention also provides nucleic acid sequence information in a computer readable medium that allows the encoded polypeptide to be optimized for a desired property. Examples of such properties include, but are not limited to, increased or decreased: thermal stability, chemical stability, hydrophylicity, hydrophobicity, and the like. Methods for the use of computers to model polypeptides and polynucleotides having altered activities are well known in the art and have been reviewed. (Lesyng B. and McCammon J A, Pharmocol. Ther., 60:149 (1993); Surles et al., Protein Sci., 3:198 (1994); Koehl P. and Delarue M., Curr. Opin. Struct. Biol., 6:222 (1996); Rossi et al., Biophys. J., 80:480 (2001)).

[0239] The polynucleic acid segments of the invention may be contained within a vector. A vector may include, but is not limited to, any plasmid, phagemid, F-factor, virus, cosmid, phage or Agrobacterium binary vector in double or single stranded linear or circular form which may or may not be self transmissible or mobilizable. The vector can also transform a prokaryotic or eukaryotic host either by integration into the cellular genome or exist extrachromosomally (e.g. autonomous replicating plasmid with an origin of replication).

[0240] Preferably the nucleic acid in the vector is under the control of, and operably linked to, an appropriate promoter or other regulatory elements for transcription in vitro or in a host cell such as a plant cell or microbe, e.g. bacteria. The vector may be a bi-functional expression vector which functions in multiple hosts. In the case of genomic DNA, this may contain its own promoter or other regulatory elements and in the case of cDNA this may be under the control of a promoter or other regulatory sequences for expression in a host cell.

[0241] Specifically included are shuttle vectors by which is meant a DNA vehicle capable, naturally or by design, of replication in two different host organisms, which may be selected from actinomycetes and related species, bacteria and eukaryotic cells (e.g. higher plant, mammalian, yeast or fungal).

[0242] The vector may also be a cloning vector which typically contain one or a small number of restriction endonuclease recognition sites at which foreign DNA sequences can be inserted in a determinable fashion. Such insertion can occur without loss of essential biological function of the cloning vector. A cloning vector may also contain a marker gene that is suitable for use in the identification and selection of cells transformed with the cloning vector. Examples of marker genes are tetracycline resistance, hygromycin resistance or ampicillin resistance. Many cloning vectors are commercially available (Stratagene, New England Biolabs, Clonetech).

[0243] The polynucleic acid segments of the invention may also be inserted into an expression vector. The selection of an appropriate expression vector will depend upon the method of introducing the expression vector into host cells. Typically an expression vector contains (1) prokaryotic DNA elements coding for a bacterial replication origin and an antibiotic resistance gene to provide for the amplification and selection of the expression vector in a bacterial host; (2) regulatory elements that control initiation of transcription such as a promoter; and (3) DNA elements that control the processing of transcripts such as introns, transcription termination/polyadenylation sequence; and (4) a reporter gene that is operatively linked to the DNA elements to control transcription initiation. Useful reporter genes include beta-glucuronidase, beta-galactosidase, chloramphenicol acetyl transferase, luciferase, green fluorescent protein (GFP) and the like. Preferably the reporter gene is either beta-glucuronidase (GUS), GFP or luciferase.

[0244] The general descriptions of plant expression vectors and reporter genes can be found in Gruber, et al., “Vectors for Plant Transformation, in Methods in Plant Molecular Biology & Biotechnology” in Glich et al., (Eds. pp. 89-119, CRC Press, 1993). Moreover GUS expression vectors and GUS gene cassettes are available from Clonetech Laboratories, Inc., Palo Alto, Calif. while luciferase expression vectors and luciferase gene cassettes are available from Promega Corp. (Madison, Wis.).

[0245] Methods to introduce a polynucleic acid segment into a vector are well known in the art (Sambrook et al., 1989).

[0246] The invention also provides an expression cassette which contains a DNA sequence capable of directing expression of a particular polynucleic acid segment of the invention either in vitro or in a host cell. Examples of such polynucleic acid segments are those segments corresponding to genes modulated within a cell by posttranscriptional gene silencing from cereals, but especially from rice, identified in Tables 1 and 2 and listed in the sequence listing or nucleic acid sequences having at least 70% nucleic acid identity to the sequences of in the sequence listing. Also, a polynucleic acid segment of the invention may be inserted into the expression cassette such that an anti-sense message is produced. The expression cassette is an isolatable unit such that the expression cassette may be in linear form and functional in in vitro transcription and translation assays. For example, the materials and procedures to conduct these assays are commercially available from Promega Corp. (Madison, Wis.). For example, an in vitro transcript may be produced by placing a polynucleotide sequence under the control of a T7 promoter and then using T7 RNA polymerase to produce an in vitro transcript. This transcript may then be translated in vitro through use of a rabbit reticulocyte lysate. Alternatively, the expression cassette can be incorporated into a vector allowing for replication and amplification of the expression cassette within a host cell or also in vitro transcription and translation of a polynucleotide sequence.

[0247] Such an expression cassette may contain one or a plurality of restriction sites allowing for placement of the polynucleic acid segment under the regulation of a regulatory sequence. The expression cassette can also contain a termination signal operably linked to the polynucleic acid segment as well as regulatory sequences required for proper translation of the polynucleic acid segment. The polynucleic acid segment may be one of the segments corresponding to genes modulated within a cell by posttranscriptional gene silencing from cereals, but especially from rice identified in Tables 1 and 2 and in the sequence listing, or a nucleic acid sequence having at least 70% sequence identity with any of in the sequence listing or a mutant thereof. The expression cassette containing the polynucleic acid segment may be chimeric, meaning that at least one of its components is heterologous with respect to at least one of its other components. The expression cassette may also be one which is naturally occurring but has been obtained in a recombinant form useful for heterologous expression. Expression of the polynucleic acid segment in the expression cassette may be under the control of a constitutive promoter or an inducible promoter which initiates transcription only when the host cell is exposed to some particular external stimulus.

[0248] The expression cassette may include in the 5′-3′ direction of transcription, a transcriptional and translational initiation region, a polynucleic acid segment and a transcriptional and translational termination region functional in vivo and/or in vitro. The termination region may be native with the transcriptional initiation region, may be native with the polynucleic acid segment, or may be derived from another source. Convenient termination regions are available from the Ti-plasmid of A. tumefaciens, such as the octopine synthase and nopaline synthase termination regions. See also, Guerineau et al., Mol. Gen. Genet., 262:141 (1991); Proudfoot, Cell, 64:671 (1991); Sanfacon et al., Genes Dev., 5:141 (1991); Mogen et al., Plant Cell, 2:1261 (1990); Munroe et al., Gene, 91:151 (1990); Ballas et al., Nucleic Acids Res., 17:7891 (1989); Joshi et al., Nucleic Acid Res., 15:9627 (1987).

[0249] The regulatory sequence can be a polynucleotide sequence located upstream (5′ non-coding sequences), within, or downstream (3′ non-coding sequences) of a coding sequence, and which influences the transcription, RNA processing or stability, or translation of the associated coding sequence. Regulatory sequences can include, but are not limited to, enhancers, promoters, repressor binding sites, translation leader sequences, introns, and polyadenylation signal sequences. They may include natural and synthetic sequences as well as sequences which may be a combination of synthetic and natural sequences. While regulatory sequences are not limited to promoters, some useful regulatory sequences include constitutive promoters, inducible promoters, regulated promoters, tissue-specific promoters, viral promoters and synthetic promoters.

[0250] A promoter is a nucleotide sequence which controls the expression of the coding sequence by providing the recognition for RNA polymerase and other factors required for proper transcription. A promoter includes a minimal promoter, consisting only of all basal elements needed for transcription initiation, such as a TATA-box and/or initiator that is a short DNA sequence comprised of a TATA-box and other sequences that serve to specify the site of transcription initiation, to which regulatory elements are added for control of expression. A promoter may be derived entirely from a native gene, or be composed of different elements derived from different promoters found in nature, or even be comprised of synthetic DNA segments. A promoter may contain DNA sequences that are involved in the binding of protein factors which control the effectiveness of transcription initiation in response to physiological or developmental conditions. A promoter may also include a minimal promoter plus a regulatory element or elements that are capable of controlling the expression of a coding sequence or functional RNA. This type of promoter sequence consists of proximal and more distal elements, the latter elements are often referred to as enhancers. The promoter may also be inducible.

[0251] Several inducible promoters have been reported. Many are described in a review by Gatz (Current Opinion in Biotechnology, 7:168 (1996); Gatz, C., Annu. Rev. Plant Physiol. Plant Mol. Biol., 48:89 (1997)). Examples include tetracycline repressor system, Lac repressor system, copper-inducible systems, salicylate-inducible systems (such as the PR1a system), glucocorticoid-(Aoyama T. et al., N-H Plant Journal, 11:605 (1997)) and ecdysome-inducible systems. Also included are the benzene sulphonamide-(U.S. Pat. No. 5,364,780) and alcohol-(WO 97/06269 and WO 97/06268) inducible systems and glutathione S-transferase promoters. In the case of a multicellular organism, the promoter can also be specific to a particular tissue or organ or stage of development.

[0252] An enhancer is a DNA sequence which can stimulate promoter activity and may be an innate element of the promoter or a heterologous element inserted to enhance the level or tissue specificity of a promoter. It is capable of operating in both orientations (normal or flipped), and is capable of functioning even when moved either upstream or downstream from the promoter. Both enhancers and other upstream promoter elements bind sequence-specific DNA-binding proteins that mediate their effects.

[0253] The expression cassette can contain a 5′ non-coding sequence which is a nucleotide sequence located 5′ (upstream) to the coding sequence. It is present in the fully processed mRNA upstream of the initiation codon and may affect processing of the primary transcript to mRNA, stability of the mRNA or translation efficiency. Turner et al., Molecular Biotechnology, 3:225 (1995).

[0254] The expression cassette may also contain a 3′ non-coding sequence which is a nucleotide sequence located 3′(downstream) to a coding sequence and includes polyadenylation signal sequences and other sequences encoding regulatory signals capable of affecting mRNA processing or gene expression. The polyadenylation signal is usually characterized by affecting the addition of polyadenylic acid tracts to the 3′ end of the mRNA precursor. The use of different 3′ non-coding sequences is exemplified by Ingelbrecht et al., Plant Cell, 1:671 (1989).

[0255] The invention also provides a construct containing a vector and an expression cassette. The vector may be selected from, but not limited to, any vector described herein. Into this vector may be inserted an expression cassette containing the nucleic acid sequences of the invention through methods known in the art and previously described (Sambrook et al., 1989). In one embodiment, the regulatory sequences of the expression cassette may be derived from a source other than the vector into which the expression cassette is inserted. In another embodiment, a construct containing a vector and an expression cassette is formed upon insertion of a polynucleic acid segment of the invention into a vector that itself contains regulatory sequences. Thus, an expression cassette is formed upon insertion of the polynucleic acid segment into the vector. Vectors containing regulatory sequences are available commercially and methods for their use are known in the art (Clonetech, Promega, Stratagene).

[0256] The invention also provides a mutagenesis cassette. In one embodiment, the mutagenesis cassette contains an intervening nucleotide sequence linked on both ends to a flanking nucleotide sequence that hybridizes under low stringency conditions to a gene that is modulated within a cell by posttranscriptional gene silencing. Preferably the flanking nucleotide sequence is a sequence having at least 70% nucleic acid sequence identity to a nucleic acid sequence corresponding to genes modulated within a cell by posttranscriptional gene silencing from cereals, but especially from rice, identified in Tables 1 and 2 and described by any of the sequences in the sequence listing or the complement, variant, or ortholog thereof. More preferably the flanking nucleotide sequence is a sequence described by any of in the sequence listing or the complement thereof. The intervening sequence may be any sequence that is of a length allowing it to be recombined into the DNA of a cell. Preferably the intervening sequence encodes a mutant of a gene that is modulated within a cell by posttranscriptional gene silencing. More preferably the intervening sequence encodes a mutant of a polynucleic acid segment corresponding to genes modulated within a cell by posttranscriptional gene silencing from cereals, but especially from rice, identified in Tables 1 and 2 and described by one of the sequences in the sequence listing. The intervening sequence may also encode a selectable marker. More preferably the intervening sequence confers chemical resistance.

[0257] The mutagenesis cassette may be constructed through methods known in the art (Sambrook et al., 1989). In one example put forth for illustration only and not meant to be limiting in any way, a polynucleic acid segment as described by in the sequence listing can be inserted into a vector through use of one or more restriction endonucleases and ligase as previously described. Next, one or more restriction endonuclease recognition sites are chosen that are within the inserted sequence. The inserted sequence is digested with one or more endonucleases to create a linearized nucleic acid sequence having the vector sequence linked on both ends to fragments of the inserted sequence. A nucleic acid sequence that is to be the intervening sequence of the mutagenesis cassette is then digested with restriction endonucleases to produce a polynucleic acid fragment having ends able to be ligated to the ends of the inserted sequence that are linked to the vector sequence. The ends of the intervening sequence are then ligated to the ends of the inserted sequence. This forms a circularized construct having an intervening sequence linked on both sides to fragments of the polynucleic acid segment corresponding to genes modulated within a cell by posttranscriptional gene silencing from cereals, but especially from rice, identified in Tables 1 and 2 and described by any of the sequences in the sequence listing. The construct may be further digested with restriction endonucleases that recognize sites within the vector sequence to produce a linear cassette containing the intervening sequence linked on both ends to a polynucleic acid segment of in the sequence listing. The mutagenesis cassette of the invention may also be incorporated into a vector. This may be done according to methods known in the art or as previously described (Sambrook et al., 1989). Preferably the vector is a plasmid. More preferably the vector is the Ti plasmid.

[0258] The expression and/or mutagenesis cassette according to the invention, or a vector construct containing the expression and/or mutagenesis cassette may be inserted into a cell. The expression cassette or vector construct may be carried episomally or integrated into the genome of the cell. The transformed cell may then be grown into a transgenic organism, such as a plant or animal. Accordingly, the invention provides the products of the transgenic plant, animal, or other organism. Such products may include, but are not limited to, seeds, fruits, progeny, products of the progeny, and the transgenic plant, animal or other organism.

[0259] A variety of techniques are available and known to those skilled in the art for introduction of constructs including vectors, expression cassettes, expression vectors, etc, into a cellular host. Transformation of bacteria and many eukaryotic cells may be accomplished through use of polyethylene glycol, calcium chloride, viral infection, phage infection, electroporation and other methods known in the art.

[0260] Techniques for transforming plant cells include transformation with DNA employing A. tumefaciens or A. rhizogenes as the transforming agent, electroporation, DNA injection, microprojectile bombardment, particle acceleration, etc. (See, for example, EP 295959 and EP 138341).

[0261] Many vectors are available for transformation using Agrobacterium tumefaciens. It is particularly preferred to use the binary type vectors of Ti and Ri plasmids of Agrobacterium spp. such as pBIN19. Bevan, Nucl. Acids Res. (1984). An additional vector useful for Agrobacterium-mediated transformation is the binary vector pCIB 10, which contains a gene encoding kanamycin resistance for selection in plants, T-DNA right and left border sequences and incorporates sequences from the wide host- range plasmid pRK252 allowing it to replicate in both E. coli and Agrobacterium. Its construction is described by Rothstein et al., Gene, 53, 153 (1987). Various derivatives of pCIB10 have been constructed which incorporate the gene for hygromycin B phosphotransferase described by Gritz et al., Gene, 25, 179 (1983). These derivatives enable selection of transgenic plant cells on hygromycin only (pCIB743), or hygromycin and kanamycin (pCIB715, pCIB717).

[0262] Ti-derived vectors transform a wide variety of higher plants, including monocotyledonous and dicotyledonous plants, such as soybean, cotton, rape, tobacco, and rice (Pacciotti et al. Bio/Technology, 3:241 (1985): Byrne et al. Plant Cell Tissue and Organ Culture, 8:3 (1987); Sukhapinda et al. Plant Mol. Biol., 8:209 (1987); Lorz et al. Mol. Gen. Genet., 199:178 (1985); Potrykus Mol. Gen. Genet., 199:183 (1985); Park et al., J. Plant Biol., 38:365 (1985): Hiei et al., i Plant J., 6:271(1994). The use of T-DNA to transform plant cells has received extensive study and is amply described (EP 120516; Hoekema, In: The Binary Plant Vector System. Offset-drukkerij Kanters B. V.; Alblasserdam (1985), Chapter V; Knauf, et al., Genetic Analysis of Host Range Expression by Agrobacterium In: Molecular Genetics of the Bacteria-Plant Interaction, Puhler, A. ed., Springer-Verlag, New York, 1983, p. 245; and An. et al., EMBO J., 4:277 (1985).

[0263] The expression cassettes and vectors of the present invention can be introduced into the plant cell in a number of art-recognized ways. Those skilled in the art will appreciate that the choice of method might depend on the type of plant, i.e., monocotyledonous or dicotyledonous, targeted for transformation. Suitable methods of transforming plant cells include, but are not limited to, microinjection (Crossway et al., BioTechniques, 4, 320 (1986)), electroporation (Riggs et al., Proc. Natl. Acad. Sci. USA, 83, 5602 (1986), Agrobacterium-mediated transformation (De Blaere et al., Meth. Enzymol., 143, 277 (1987); Hinchee et al., Biotechnology, 6, 915 (1988)), direct gene transfer (Paszkowski et al., EMBO J., 3, 2717 (1984)), and ballistic particle acceleration using devices available from Agracetus, Inc., Madison, Wis. and BioRad, Hercules, Calif. (see, for example, Sanford et al., U.S. Pat. No. 4,945,050; and McCabe et al., Biotechnology, 6, 923-926 (1988)). Also see, Weissinger et al., Annual Rev. Genet., 22, 421 (1988); Sanford et al., Particulate Science and Technology, 5, 27 (1987)(onion); Christou et al., Plant Physiol., 87, 671 (1988)(soybean); McCabe et al., Bio/Technology, 6, 923 (1988)(soybean); Datta et al., Bio/Technology, 8, 736 (1990)(rice); Klein et al., Proc. Natl. Acad. Sci. USA, 85, 4305 (1988)(maize); Klein et al., Bio/Technology, 6, 559 (1988)(maize); Klein et al., Plant Physiol., 91:440 (1988)(maize); Fromm et al., Bio/Technology, 8, 833 (1990)(maize); and Gordon-Kamm et al., Plant Cell, 2, 603 (1990)(maize); Svab et al., Proc. Natl. Acad. Sci. USA, 87, 8526 (1990)(tobacco chloroplast); Koziel et al., Biotechnology, 11, 194 (1993)(maize); Shimamoto et al., Nature, 338, 274 (1989)(rice); Christou et al., Biotechnology, 9, 957 (1991)(rice); European Patent Application EP 0 332 581 (orchardgrass and other Pooideae); Vasil et al., Biotechnology, 11, 1553 (1993)(wheat); Weeks et al., Plant Physiol., 102, 1077 (1993)(wheat). Methods in Moleculary Biology, 82. Arabidopsis Protocols Ed. Martinez-Zapater and Salinas 1998 Humana Press (Arabidopsis).

[0264] Transformation of plants can be undertaken with a single DNA molecule or multiple DNA molecules (i.e., co-transformation), and both these techniques are suitable for use with the expression cassettes of the present invention. Numerous transformation vectors are available for plant transformation, and the expression cassettes of this invention can be used in conjunction with any such vectors. The selection of vector will depend upon the preferred transformation technique and the target species for transformation.

[0265] For certain plant species, different antibiotic or herbicide selection markers may be preferred. Selection markers used routinely in transformation include the nptII gene which confers resistance to kanamycin and related antibiotics (Messing & Vierra, Gene, 19: 259 (1982); Bevan et al., Nature, 304: 184 (1983)), the bar gene which confers resistance to the herbicide phosphinothricin (White et al., Nucl Acids Res, 18; 1062 (1990), Spencer et al., Theor. Appl. Genet, 79: 625 (1990)), the hph gene which confers resistance to the antibiotic hygromycin (Blochinger & Diggelmann, Mol Cell Biol, 4: 2929), and the dhfr gene, which confers resistance to methotrexate (Bourouis et al., EMBO J., 2;1099 (1983)).

[0266] One such vector useful for direct gene transfer techniques in combination with selection by the herbicide Basta (or phosphinothricin) is pCIB3064. This vector is based on the plasmid pCIB246, which comprises the CaMV 35S promoter in operational fusion to the E. coli GUS gene and the CaMV 35S transcriptional terminator and is described in the PCT published application WO 93/07278, herein incorporated by reference. One gene useful for conferring resistance to phosphinothricin is the bar gene from Streptomyces viridochromogenes (Thompson et al., EMBO J, 6: 2519 (1987)). This vector is suitable for the cloning of plant expression cassettes containing their own regulatory signals. An additional transformation vector is pSOG35 which utilizes the E. coli gene dihydrofolate reductase (DHFR) as a selectable marker conferring resistance to methotrexate.

[0267] Plant species may be transformed with a construct of the present invention by the DNA-mediated transformation of plant cell protoplasts and subsequent regeneration of the plant from the transformed protoplasts in accordance with procedures well known in the art.

[0268] Any plant tissue capable of subsequent clonal propagation, whether by organogenesis or embryogenesis, may be transformed with a construct of the present invention. The term organogenesis means a process by which shoots and roots are developed sequentially from meristematic centers while the term embryogenesis means a process by which shoots and roots develop together in a concerted fashion (not sequentially), whether from somatic cells or gametes. The particular tissue chosen will vary depending on the clonal propagation systems available for, and best suited to, the particular species being transformed. Exemplary tissue targets include leaf disks, pollen, embryos, cotyledons, hypocotyls, megagametophytes, callus tissue, existing meristematic tissue (e.g., apical meristems, axillary buds, and root meristems), and induced meristem tissue (e.g., cotyledon meristem and hypocotyl meristem).

[0269] Plants of the present invention may take a variety of forms. The plants may be chimeras of transformed cells and non-transformed cells; the plants may be clonal transformants (e.g., all cells transformed to contain the expression cassette); the plants may comprise grafts of transformed and untransformed tissues (e.g., a transformed root stock grafted to an untransformed scion in citrus species). The transformed plants may be propagated by a variety of means, such as by clonal propagation or classical breeding techniques. For example, first generation (or T1) transformed plants may be selfed to give homozygous second generation (or T2) transformed plants, and the T2 plants further propagated through classical breeding techniques. A dominant selectable marker (such as npt II) can be associated with the expression cassette to assist in breeding.

[0270] The present invention may be used for transformation of any plant species, including, but not limited to, corn (Zea mays), Brassica sp. (e.g., B. napus, B. rapa, B. juncea), particularly those Brassica species useful as sources of seed oil, alfalfa (Medicago sativa), rice (Oryza sativa), rye (Secale cereale), sorghum (Sorghum bicolor, Sorghum vulgare), millet (e.g., pearl millet (Pennisetum glaucum), proso millet (Panicum miliaceum), foxtail millet (Setaria italica), finger millet (Eleusine coracana)), sunflower (Helianthus annuus), safflower (Carthamus tinctorius), wheat (Triticum aestivum), soybean (Glycine max), tobacco (Nicotiana tabacum), potato (Solanum tuberosum), peanuts (Arachis hypogaea), cotton (Gossypium barbadense, Gossypium hirsutum), sweet potato (Ipomoea batatus), cassava (Manihot esculenta), coffee (Cofea spp.), coconut (Cocos nucifera), pineapple (Ananas comosus), citrus trees (Citrus spp.), cocoa (Theobroma cacao), tea (Camellia sinensis), banana (Musa spp.), avocado (Persea americana), fig (Ficus casica), guava (Psidium guajava), mango (Mangifera indica), olive (Olea europaea), papaya (Carica papaya), cashew (Anacardium occidentale), macadamia (Macadamia integrifolia), almond (Prunus amygdalus), sugar beets (Beta vulgaris), sugarcane (Saccharum spp.), oats, barley, vegetables, ornamentals, and conifers.

[0271] Vegetables include tomatoes (Lycopersicon esculentum), lettuce (e.g., Lactuca sativa), green beans (Phaseolus vulgaris), lima beans (Phaseolus limensis), peas (Lathyrus spp.), and members of the genus Cucumis such as cucumber (C. sativus), cantaloupe (C. cantalupensis), and musk melon (C. melo). Ornamentals include azalea (Rhododendron spp.), hydrangea (Macrophylla hydrangea), hibiscus (Hibiscus rosasanensis), roses (Rosa spp.), tulips (Tulipa spp.), daffodils (Narcissus spp.), petunias (Petunia hybrida), carnation (Dianthus caryophyllus), poinsettia (Euphorbia pulcherrima), and chrysanthemum. Conifers that may be employed in practicing the present invention include, for example, pines such as loblolly pine (Pinus taeda), slash pine (Pinus elliotii), ponderosa pine (Pinus ponderosa), lodgepole pine (Pinus contorta), and Monterey pine (Pinus radiata), Douglas-fir (Pseudotsuga menziesii); Western hemlock (Tsuga canadensis); Sitka spruce (Picea glauca); redwood (Sequoia sempervirens); true firs such as silver fir (Abies amabilis) and balsam fir (Abies balsamea); and cedars such as Western red cedar (Thuja plicata) and Alaska yellow-cedar (Chamaecyparis nootkatensis). Leguminous plants include beans and peas. Beans include guar, locust bean, fenugreek, soybean, garden beans, cowpea, mungbean, lima bean, fava bean, lentils, chickpea, etc. Legumes include, but are not limited to, Arachis, e.g., peanuts, Vicia, e.g., crown vetch, hairy vetch, adzuki bean, mung bean, and chickpea, Lupinus, e.g., lupine, trifolium, Phaseolus, e.g., common bean and lima bean, Pisum, e.g., field bean, Melilotus, e.g., clover, Medicago, e.g., alfalfa, Lotus, e.g., trefoil, lens, e.g., lentil, and false indigo. Preferred forage and turf grass for use in the methods of the invention include alfalfa, orchard grass, tall fescue, perennial ryegrass, creeping bent grass, and redtop.

[0272] Preferably, plants of the present invention are crop plants (for example, corn, alfalfa, sunflower, Brassica, soybean, cotton, safflower, peanut, sorghum, wheat, millet, tobacco, barley, rice, tomato, potato, squash, melons, legume crops, etc.).

[0273] Transgenic plant cells are then placed in an appropriate selective medium for selection of transgenic cells which are then grown to callus. Shoots are grown from callus and plantlets generated from the shoot by growing in rooting medium. The various constructs normally will be joined to a marker for selection in plant cells. Conveniently, the marker may be resistance to a biocide (particularly an antibiotic, such as kanamycin, G418, bleomycin, hygromycin, chloramphenicol, herbicide, or the like). The particular marker used will allow for selection of transformed cells as compared to cells lacking the DNA which has been introduced. Components of DNA constructs, including transcription/expression cassettes of this invention, may be prepared from sequences which are native (endogenous) or foreign (exogenous) to the host. By “foreign” it is meant that the sequence is not found in the wild-type host into which the construct is introduced. Heterologous constructs will contain at least one region which is not native to the gene from which the transcription-initiation-region is derived.

[0274] To confirm the presence of the transgenes in transgenic cells and plants, a Southern blot analysis can be performed using methods known to those skilled in the art. Integration of a polynucleic acid segment into the genome can be detected and quantitated by Southern blot, since they can be readily distinguished from constructs containing the segments through use of appropriate restriction enzymes. Expression products of the transgenes can be detected in any of a variety of ways, depending upon the nature of the product, and include Western blot and enzyme assay. One particularly useful way to quantitate protein expression and to detect replication in different plant tissues is to use a reporter gene, such as GUS. Once transgenic plants have been obtained, they may be grown to produce plant tissues or parts having the desired phenotype. The plant tissue or plant parts may be harvested, and/or the seed collected. The seed may serve as a source for growing additional plants with tissues or parts having the desired characteristics.

[0275] The present invention also provides for the production of transgenic non-human animal models in which post-transcriptional gene silencing is present, or in which post-transcriptional gene silencing has been inactivated (e.g., “knock-out” deletions). Animal species suitable for use in the animal models of the present invention include, but are not limited to, rats, mice, hamsters, guinea pigs, rabbits, dogs, cats, goats, sheep, pigs, and nonhuman primates (e.g., Rhesus monkeys, chimpanzees). For initial studies, transgenic rodents (e.g., mice) are preferred due to their relative ease of maintenance. Indeed, as noted above, transgenic yeast or invertebrates (e.g., nematodes, insects) may be preferred for some studies because they will allow for even more rapid and inexpensive screening.

[0276] To create an animal model (e.g., a transgenic mouse), a normal or mutant polynucleic acid segement corresponding the sequence identifiers numbered 1-145, or the complement, ortholog, or variant thereof, can be inserted into a germ line or stem cell using standard techniques of oocyte microinjection, or transfection or microinjection into embryonic stem cells. Animals produced by these or similar processes are referred to as transgenic. Similarly, if it is desired to inactivate or replace an endogenous gene, homologous recombination using embryonic stem cells may be employed. Animals produced by these or similar processes are referred to as “knock-out” (inactivation) or “knock-in” (replacement) models.

[0277] For oocyte injection, one or more copies of the recombinant DNA constructs of the present invention may be inserted into the pronucleus of a just-fertilized oocyte. This oocyte is then reimplanted into a pseudo-pregnant foster mother. The liveborn animals are screened for integrants using analysis of DNA (e.g., from the tail veins of offspring mice) for the presence of the inserted recombinant transgene sequences. The transgene may be either a complete genomic sequence injected as a YAC, BAC, PAC or other chromosome DNA fragment, a cDNA with either the natural promoter or a heterologous promoter, or a minigene containing all of the coding region and other elements found to be necessary for optimum expression.

[0278] Retroviral infection of early embryos can also be done to insert the recombinant DNA constructs of the invention. In this method, the transgene is inserted into a retroviral vector which is used to infect embryos (e.g., mouse or non-human primate embryos) directly during the early stages of development to generate chimeras, some of which will lead to germline transmission.

[0279] Homologous recombination using stem cells allows for the screening of gene transfer cells to identify the rare homologous recombination events. Once identified, these can be used to generate chimeras by injection of blastocysts, and a proportion of the resulting animals will show germline transmission from the recombinant line. This methodology is especially useful if inactivation of a gene is desired. Homologous recombination leads to the insertion of the marker sequences in the middle of an exon, causing inactivation of the target gene and/or deletion of internal sequences. DNA analysis of individual clones can then be used to recognize the homologous recombination events.

[0280] The techniques of generating transgenic animals, as well as the techniques for homologous recombination or gene targeting, are now widely accepted and practiced. A laboratory manual on the manipulation of the mouse embryo, for example, is available detailing standard laboratory techniques for the production of transgenic mice (Hogan et al. (1986) Manipulating the Mouse Embryo, Cold Spring Harbor Laboratory Press, Cold Spring Harbor, N.Y.). To create a transgene, the target sequence of interest is typically ligated into a cloning site located downstream of some promoter element which will regulate the expression of RNA from the sequence. Downstream of the coding sequence, there is typically an artificial polyadenylation sequence. An alternate approach to creating a transgene is to use an endogenous promoter and regulatory sequences to drive expression of the transgene. Finally, it is possible to create transgenes using large genomic DNA fragments such as YACs which contain the entire desired gene as well as its appropriate regulatory sequences. (Lamb et al.. Nature Genetics, 5:22 (1993)).

[0281] Within a plant promoter region there are several domains that are necessary for full function of the promoter. The first of these domains lies immediately upstream of the structural gene and forms the “core promoter region” containing consensus sequences, normally 70 base pairs immediately upstream of the gene. The core promoter region contains the characteristic CAAT and TATA boxes plus surrounding sequences, and represents a transcription initiation sequence that defines the transcription start point for the structural gene.

[0282] The presence of the core promoter region defines a sequence as being a promoter: if the region is absent, the promoter is non-functional. Furthermore, the core promoter region is insufficient to provide full promoter activity. A series of regulatory sequences upstream of the core constitute the remainder of the promoter. The regulatory sequences determine expression level, the spatial and temporal pattern of expression and, for an important subset of promoters, expression under inductive conditions (regulation by external factors such as light, temperature, chemicals, hormones).

[0283] A range of naturally-occurring promoters are known to be operative in plants and have been used to drive the expression of heterologous (both foreign and endogenous) genes in plants: for example, the constitutive 35S cauliflower mosaic virus (CaMV) promoter, the ripening-enhanced tomato polygalacturonase promoter (Bird et al., Plant Molecular Biology, 11:651 (1988)), the E8 promoter (Diekman & Fischer, EMBO, 7:3315 (1988)) and the fruit specific 2A1 promoter (Pear et al., Plant Molecular Biology, 13:639 (1989)) and many others.

[0284] Two principal methods for the control of expression are known, viz.: overexpression and underexpression. Overexpression can be achieved by insertion of one or more than one extra copy of the selected gene. It is, however, not unknown for plants or their progeny, originally transformed with one or more than one extra copy of a nucleotide sequence, to exhibit the effects of underexpression as well as overexpression. For underexpression there are two principle methods which are commonly referred to in the art as “antisense downregulation” and “sense downregulation” (sense downregulation is also referred to as “cosuppression”). Generically these processes are referred to as “gene silencing”Both of these methods lead to an inhibition of expression of the target gene.

[0285] Obtaining sufficient levels of transgene expression in the appropriate plant tissues is an important aspect in the production of genetically engineered crops. Expression of heterologous DNA sequences in a plant host is dependent upon the presence of an operably linked promoter that is functional within the plant host. Choice of the promoter sequence will determine when and where within the organism the heterologous DNA sequence is expressed.

[0286] Therefore, the selection of promoters for directing expression of a given transgene is critical. Promoters which are useful for plant transgene expression include those that are inducible, viral, synthetic, constitutive (Poszkowski et al., 1989; Odell et al., Nature, 313:810 (1985)), temporally regulated, spatially regulated, tissue-specific, and spatio-temporally regulated (Chau et al., 1989).

[0287] Where expression in specific tissues or organs is desired, tissue-specific promoters may be used. In contrast, where gene expression in response to a stimulus is desired, inducible promoters are the regulatory elements of choice. Where continuous expression is desired throughout the cells of a plant, constitutive promoters are utilized. Additional regulatory sequences upstream and/or downstream from the core promoter sequence may be included in expression constructs of transformation vectors to bring about varying levels of expression of heterologous nucleotide sequences in a transgenic plant.

[0288] A number of plant promoters have been described with various expression characteristics. Examples of some constitutive promoters which have been described include the rice actin 1 (Wang et al., Mol. Cell. Biol., 12:3399 (1992); U.S. Pat. No. 5,641,876), CaMV 35S (Odell et al., Nature, 313:810 (1985)), CaMV 19S (Lawton et al., 1987), nos (Ebert et al., 1987), Adh (Walker et al., 1987), sucrose synthase (Yang & Russell, 1990); and the ubiquitin promoters.

[0289] Examples of tissue specific promoters which have been described include the lectin (Vodkin, Prog. Clin. Biol. Res., 138;87 (1983); Lindstrom et al., Der. Genet., 11:160 (1990),) corn alcohol dehydrogenase 1 (Vogel et al., 1989; Dennis et al., Nucleic Acids Res., 12:3983 (1984)), corn light harvesting complex (Simpson, 1986; Bansal et al., Proc. Natl. Acad. Sci. USA, 89:3654 (1992)), corn heat shock protein (Odell et al., 1985; Rochester et al., 1986), pea small subunit RuBP carboxylase (Poulsen et al., 1986; Cashmore et al., 1983), Ti plasmid mannopine synthase (Langridge et al., 1989), Ti plasmid nopaline synthase (Langridge et al., 1989), petunia chalcone isomerase (vanTunen et al., EMBO J., 7;1257(1988)), bean glycine rich protein 1 (Keller et al., Genes Dev., 3:1639 (1989)), truncated CaMV 35s (Odell et al., Nature, 313:810 (1985)), potato patatin (Wenzler et al., Plant Mol. Biol., 13:347 (1989)), root cell (Yamamoto et al., Nucleic Acids Res., 18:7449 (1990)), maize zein (Reina et al., Nucleic Acids Res., 18:6425 (1990); Kriz et al., Mol. Gen. Genet., 207:90 (1987); Wandelt et al., Nucleic Acids Res., 17:2354 (1989); Langridge et al., Cell, 34:1015 (1983); Reina et al., Nucleic Acids Res., 18:7449 (1990)), globulin-I (Belanger et al., Genetics, 129:863 (1991)), α-tubulin, cab (Sullivan et al., Mol. Gen. Genet., 215:431 (1989)), PEPCase (Hudspeth & Grula, 1989), R gene complex-associated promoters (Chandler et al., Plant Cell, 1:1175 (1989)), and chalcone synthase promoters (Franken et al., EMBO J., 10:2605 (1991)).

[0290] Inducible promoters that have been described include the ABA- and turgor-inducible promoters, the promoter of the auxin-binding protein gene (Schwob et al., Plant J., 4:423 (1993)), the UDP glucose flavonoid glycosyl-transferase gene promoter (Ralston et al., Genetics, 119:185 (1988)), the MPI proteinase inhibitor promoter (Cordero et al., Plant J., 6:141 (1994)), and the glyceraldehyde-3-phosphate dehydrogenase gene promoter (Kohler et al., Plant Mol. Biol., 29;1293 (1995); Quigley et al., J. Mol. Evol., 29:412 (1989); Martinez et al., J. Mol. Biol., 208:551 (1989)).

[0291] Several tissue-specific regulated genes and/or promoters have been reported in plants. These include genes encoding the seed storage proteins (such as napin, cruciferin, beta-conglycinin, and phaseolin) zein or oil body proteins (such as oleosin), or genes involved in fatty acid biosynthesis (including acyl carrier protein, stearoyl-ACP desaturase. And fatty acid desaturases (fad 2-1)), and other genes expressed during embryo development (such as Bce4, see, for example. EP 255378 and Kridl et al., Seed Science Research, 1:209 (1991)). Particularly useful for seed-specific expression is the pea vicilin promoter (Czako et al., Mol. Gen. Genet., 235:33 (1992). (See also U.S. Pat. No. 5,625,136, herein incorporated by reference.) Other useful promoters for expression in mature leaves are those that are switched on at the onset of senescence, such as the SAG promoter from Arabidopsis (Gan et al., Science, 270:1986 (1995).

[0292] A class of fruit-specific promoters expressed at or during antithesis through fruit development, at least until the beginning of ripening, is discussed in U.S. Pat. No. 4,943,674, the disclosure of which is hereby incorporated by reference. cDNA clones that are preferentially expressed in cotton fiber have been isolated (John et al., Proc. Natl. Acad. Sci. USA, 89:5769 (1992). cDNA clones from tomato displaying differential expression during fruit development have been isolated and characterized (Mansson et al., Gen. Genet., 200:356 (1985), Slater et al., Plant Mol. Biol., 5:137 (1985)). The promoter for polygalacturonase gene is active in fruit ripening. The polygalacturonase gene is described in U.S. Pat. No. 4,535,060, U.S. Pat. No. 4,769,061, U.S. Pat. No. 4,801,590, and U.S. Pat. No. 5,107,065, which disclosures are incorporated herein by reference.

[0293] Other examples of tissue-specific promoters include those that direct expression in leaf cells following damage to the leaf (for example, from chewing insects), in tubers (for example, patatin gene promoter), and in fiber cells (an example of a developmentally-regulated fiber cell protein is E6 (John et al., Proc. Natl. Acad. Sci. USA, 89:5769 (1992). The E6 gene is most active in fiber, although low levels of transcripts are found in leaf, ovule and flower.

[0294] The tissue-specificity of some “tissue-specific” promoters may not be absolute and may be tested by one skilled in the art using the diphtheria toxin sequence. One can also achieve tissue-specific expression with “leaky” expression by a combination of different tissue-specific promoters (Beals et al., Plant Cell, 9:1527 (1997)). Other tissue-specific promoters can be isolated by one skilled in the art (see U.S. 5,589,379). Several inducible promoters (“gene switches”) have been reported. Many are described in the review by Gatz (Current Opinion in Biotechnology, 7:168 (1996); Gatz, C., Annu. Rev. Plant Physiol. Plant Mol. Biol., 48:89 (1997)). These include tetracycline repressor system, Lac repressor system, copper-inducible systems, salicylate-inducible systems (such as the PR1a system), glucocorticoid-(Aoyama T. et al., N-H Plant Journal, 11:605 (1997)) and ecdysome-inducible systems. Also included are the benzene sulphonamide-(U.S. Pat. No. 5364,780) and alcohol-(WO 97/06269 and WO 97/06268) inducible systems and glutathione S-transferase promoters. Other studies have focused on genes inducibly regulated in response to environmental stress or stimuli such as increased salinity. Drought, pathogen and wounding. (Graham et al., J. Biol. Chem., 260:6555 (1985); Graham et al., J. Biol. Chem., 260:6561 (1985), Smith et al., Planta, 168:94 (1986)). Accumulation of metallocarboxypeptidase-inhibitor protein has been reported in leaves of wounded potato plants (Graham et al., Biochem. Biophys. Res. Comm., 101:1164 (1981)). Other plant genes have been reported to be induced methyl jasmonate, elicitors, heat-shock, anaerobic stress, or herbicide safeners.

[0295] Regulated expression of the chimeric transacting viral replication protein can be further regulated by other genetic strategies. For example, Cre-mediated gene activation as described by Odell et al. Mol. Gen. Genet., 113:369 (1990). Thus, a DNA fragment containing 3′ regulatory sequence bound by lox sites between the promoter and the replication protein coding sequence that blocks the expression of a chimeric replication gene from the promoter can be removed by Cre-mediated excision and result in the expression of the trans-acting replication gene. In this case, the chimeric Cre gene, the chimeric trans-acting replication gene, or both can be under the control of tissue-and developmental-specific or inducible promoters. An alternate genetic strategy is the use of tRNA suppressor gene. For example, the regulated expression of a tRNA suppressor gene can conditionally control expression of a trans-acting replication protein coding sequence containing an appropriate termination codon as described by Ulmasov et al. Plant Mol. Biol., 35:417 (1997). Again, either the chimeric tRNA suppressor gene, the chimeric transacting replication gene, or both can be under the control of tissue- and developmental-specific or inducible promoters.

[0296] Frequently it is desirable to have continuous or inducible expression of a DNA sequence throughout the cells of an organism in a tissue-independent manner. For example, increased resistance of a plant to infection by soil- and air borne pathogens might be accomplished by genetic manipulation of the plant's genome to comprise a continuous promoter operably linked to a heterologous pathogen-resistance gene such that pathogen-resistance proteins are continuously expressed throughout the plant's tissues.

[0297] Alternatively, it might be desirable to inhibit expression of a native DNA sequence within a plant's tissues to achieve a desired phenotype. In this case, such inhibition might be accomplished with transformation of the plant to comprise a constitutive, tissue-independent promoter operably linked to an antisense nucleotide sequence, such that constitutive expression of the antisense sequence produces an RNA transcript that interferes with translation of the mRNA of the native DNA sequence.

[0298] To define a minimal promoter region, a DNA segment representing the promoter region is removed from the 5′ region of the gene of interest and operably linked to the coding sequence of a marker (reporter) gene by recombinant DNA techniques well known to the art. The reporter gene is operably linked downstream of the promoter, so that transcripts initiating at the promoter proceed through the reporter gene. Reporter genes generally encode proteins which are easily measured, including, but not limited to, chloramphenicol acetyl transferase (CAT), beta-glucuronidase (GUS), green fluorescent protein (GFP), beta-galactosidase (beta-GAL), and luciferase.

[0299] The construct containing the reporter gene under the control of the promoter is then introduced into an appropriate cell type by transfection techniques well known to the art. To assay for the reporter protein, cell lysates are prepared and appropriate assays, which are well known in the art, for the reporter protein are performed. For example, if CAT were the reporter gene of choice, the lysates from cells transfected with constructs containing CAT under the control of a promoter under study are mixed with isotopically labeled chloramphenicol and acetyl-coenzyme A (acetyl-CoA). The CAT enzyme transfers the acetyl group from acetyl-CoA to the 2- or 3-position of chloramphenicol. The reaction is monitored by thin-layer chromatography, which separates acetylated chloramphenicol from unreacted material. The reaction products are then visualized by autoradiography.

[0300] The level of enzyme activity corresponds to the amount of enzyme that was made, which in turn reveals the level of expression from the promoter of interest. This level of expression can be compared to other promoters to determine the relative strength of the promoter under study. In order to be sure that the level of expression is determined by the promoter, rather than by the stability of the mRNA, the level of the reporter mRNA can be measured directly, such as by Northern blot analysis.

[0301] Once activity is detected, mutational and/or deletional analyses may be employed to determine the minimal region and/or sequences required to initiate transcription. Thus, sequences can be deleted at the 5′ end of the promoter region and/or at the 3′ end of the promoter region, and nucleotide substitutions introduced. These constructs are then introduced to cells and their activity determined.

[0302] In addition to the use of a particular promoter, other types of elements can influence expression of transgenes. In particular, introns have demonstrated the potential for enhancing transgene expression. For example, Callis et al., Genes Dev., 1:1183 (1987) described an intron from the corn alcohol dehydrogenase gene, which is capable of enhancing the expression of transgenes in transgenic plant cells. Similarly, Vasil et al., Mol. Microbiol., 3:371 (1989) described an intron from the corn sucrose synthase gene having similar enhancing activity. The rice actin 1 intron, has been widely used in the enhancement of transgene expression in a number of different transgenic crops. McElroy et al., Mol. Gen. Genet., 231:150 (1991).

[0303] Other elements include those that can be regulated by endogenous or exogenous agents, e.g., by zinc finger proteins, including naturally occurring zinc finger proteins or chimeric zinc finger proteins. See, e.g., U.S. Pat. No. 5,789,538, WO 99/48909; WO 99/45132; WO 98/53060; WO 98/53057; WO 98/53058; WO 00/23464; WO 95/19431; and WO 98/54311.

[0304] Virtually any DNA composition may be used for delivery to recipient monocotyledonous cells to ultimately produce fertile transgenic plants in accordance with the present invention. For example, DNA segments in the form of vectors and plasmids, or linear DNA fragments, in some instances containing only the DNA element to be expressed in the plant, and the like, may be employed.

[0305] In certain embodiments, it is contemplated that one may wish to employ replication-competent viral vectors in monocot transformation. Such vectors include, for example, wheat dwarf virus (WDV) “shuttle” vectors, such as pW1 -11 and PW1-GUS (Ugaki et al., Nucl. Acids Res., 19:371 (1991)). These vectors are capable of autonomous replication in maize cells as well as E. coli , and as such may provide increased sensitivity for detecting DNA delivered to transgenic cells. A replicating vector may also be useful for delivery of genes flanked by DNA sequences from transposable elements such as Ac, Ds, or Mu. It is also contemplated that transposable elements would be useful for introducing DNA fragments lacking elements necessary for selection and maintenance of the plasmid vector in bacteria, e.g., antibiotic resistance genes and origins of DNA replication. It is also proposed that use of a transposable element such as Ac, Ds, or Mu would actively promote integration of the desired DNA and hence increase the frequency of stably transformed cells.

[0306] Vectors, plasmids, cosmids, YACs (yeast artificial chromosomes) BACs (bacterial artificial chromosomes) and DNA segments for use in transforming such cells will generally comprise the cDNA, gene or genes which one desires to introduce into the cells. These DNA constructs can further include structures such as promoters, enhancers, polylinkers, or even regulatory genes as desired. The DNA segment or gene chosen for cellular introduction will often encode a protein which will be expressed in the resultant recombinant cells, such as will result in a screenable or selectable trait and/or which will impart an improved phenotype to the regenerated plant. However, this may not always be the case, and the present invention also encompasses transgenic plants incorporating non-expressed transgenes.

[0307] DNA useful for introduction into plant cells includes that which has been derived or isolated from any source, that may be subsequently characterized as to structure, size and/or function, chemically altered, and later introduced into plants. An example of DNA “derived” from a source, would be a DNA sequence that is identified as a useful fragment within a given organism, and which is then chemically synthesized in essentially pure form. An example of such DNA “isolated” from a source would be a useful DNA sequence that is excised or removed from said source by chemical means, e.g., by the use of restriction endonucleases, so that it can be further manipulated, e.g., amplified, for use in the invention, by the methodology of genetic engineering. Such DNA is commonly referred to as “recombinant DNA.”

[0308] Therefore useful DNA includes completely synthetic DNA, semi-synthetic DNA, DNA isolated from biological sources, and DNA derived from introduced RNA. Generally, the introduced DNA is not originally resident in the plant genotype which is the recipient of the DNA, but it is within the scope of the invention to isolate a gene from a given plant genotype, and to subsequently introduce multiple copies of the gene into the same genotype, e.g., to enhance production of a given gene product such as a storage protein or a protein that confers tolerance or resistance to water deficit.

[0309] The introduced DNA includes but is not limited to, DNA from plant genes, and non-plant genes such as those from bacteria, yeasts, animals or viruses. The introduced DNA can include modified genes, portions of genes, or chimeric genes, including genes from the same or different maize genotype. The term “chimeric gene” or “chimeric DNA” is defined as a gene or DNA sequence or segment comprising at least two DNA sequences or segments from species which do not combine DNA under natural conditions, or which DNA sequences or segments are positioned or linked in a manner which does not normally occur in the native genome of untransformed plant.

[0310] The introduced DNA used for transformation herein may be circular or linear, double-stranded or single-stranded. Generally, the DNA is in the form of chimeric DNA, such as plasmid DNA, that can also contain coding regions flanked by regulatory sequences which promote the expression of the recombinant DNA present in the resultant plant. For example, the DNA may itself comprise or consist of a promoter that is active in a plant which is derived from a source other than that plant, or may utilize a promoter already present in a plant genotype that is the transformation target.

[0311] Generally, the introduced DNA will be relatively small, i.e., less than about 30 kb to minimize any susceptibility to physical, chemical, or enzymatic degradation which is known to increase as the size of the DNA increases. As noted above, the number of proteins, RNA transcripts or mixtures thereof which is introduced into the plant genome is preferably preselected and defined, e.g., from one to about 5-10 such products of the introduced DNA may be formed.

[0312] The construction of vectors which may be employed in conjunction with the present invention will be known to those of skill of the art in light of the present disclosure (see e.g., Sambrook et al., Molecular Cloning, A Laboratory Manual (1989); Gelvin et al., Plant Molecular Biology Manual (1990)).

[0313] Constructs will also include the gene of interest along with a 3′ end DNA sequence that acts as a signal to terminate transcription and allow for the poly-adenylation of the resultant mRNA. The preferred 3′ elements are contemplated to be those from the nopaline synthase gene of Agrobacterium tumefaciens (Bevan et al., Nucl. Acids Res., 11:369 (1983)), the terminator for the T7 transcript from the octopine synthase gene of Agrobacterium tumefaciens, and the 3′ end of the protease inhibitor I or II genes from potato or tomato. Regulatory elements such as Adh intron 1 (Callis et al., Genes and Develop., 1:1183 (1987)), sucrose synthase intron (Vasil et al., Plant Physiol., 91:1575 (1989)) or TMV omega element (Gallie, et al., The Plant Cell, 1:301(1989)), may further be included where desired.

[0314] As the DNA sequence between the transcription initiation site and the start of the coding sequence, i.e., the untranslated leader sequence, can influence gene expression, one may also wish to employ a particular leader sequence. Preferred leader sequences are contemplated to include those which include sequences predicted to direct optimum expression of the attached gene, i.e., to include a preferred consensus leader sequence which may increase or maintain mRNA stability and prevent inappropriate initiation of translation. The choice of such sequences will be known to those of skill in the art in light of the present disclosure. Sequences that are derived from genes that are highly expressed in plants will be most preferred.

[0315] Vectors for use in accordance with the present invention may be constructed to include the ocs enhancer element. This element was first identified as a 16 bp palindromic enhancer from the octopine synthase (ocs) gene of Agrobacterium (Ellis et al., EMBO Journal, 6:3203 (1987)), and is present in at least 10 other promoters (Bouchez et al., EMBO Journal, 8:4197 (1989)). The use of an enhancer element, such as the ocs element and particularly multiple copies of the element, will act to increase the level of transcription from adjacent promoters when applied in the context of monocot transformation.

[0316] Ultimately, the most desirable DNA segments for introduction into a monocot genome may be homologous genes or gene families which encode a desired trait (e.g., increased yield per acre) and which are introduced under the control of novel promoters or enhancers, etc., or perhaps even homologous or tissue specific (e.g., root-, collar/sheath-, whorl-, stalk-, earshank-, kernel- or leaf-specific) promoters or control elements. Indeed, it is envisioned that a particular use of the present invention will be the targeting of a gene in a constitutive manner or a virus-modulated manner.

[0317] Vectors for use in tissue-specific targeting of genes in transgenic plants will typically include tissue-specific promoters and may also include other tissue-specific control elements such as enhancer sequences. Promoters which direct specific or enhanced expression in certain plant tissues will be known to those of skill in the art in light of the present disclosure. These include, for example, the rbcS promoter, specific for green tissue; the ocs, nos and mas promoters which have higher activity in roots or wounded leaf tissue; a truncated (−90 to +8) 35S promoter which directs enhanced expression in roots, an alpha-tubulin gene that directs expression in roots and promoters derived from zein storage protein genes which direct expression in endosperm.

[0318] Tissue specific expression may be functionally accomplished by introducing a constitutively expressed gene (all tissues) in combination with an antisense gene that is expressed only in those tissues where the gene product is not desired. For example, a gene coding for the crystal toxin protein from B. thuringiensis (Bt) may be introduced such that it is expressed in all tissues using the 35S promoter from Cauliflower Mosaic Virus. Expression of an antisense transcript of the Bt gene in a maize kernel, using for example a zein promoter, would prevent accumulation of the Bt protein in seed. Hence the protein encoded by the introduced gene would be present in all tissues except the kernel.

[0319] Expression of some genes in transgenic plants will be desired only under specified conditions. For example, it is proposed that expression of certain genes that confer resistance to environmental stress factors such as drought will be desired only under actual stress conditions. It is contemplated that expression of such genes throughout a plants development may have detrimental effects. It is known that a large number of genes exist that respond to the environment. For example, expression of some genes such as rbcS, encoding the small subunit-of ribulose bisphosphate carboxylase, is regulated by light as mediated through phytochrome. Other genes are induced by secondary stimuli. For example, synthesis of abscisic acid (ABA) is induced by certain environmental factors, including but not limited to water stress. A number of genes have been shown to be induced by ABA (Skriver and Mundy, Plant Cell, 2:503 (1990)). It is also anticipated that expression of genes conferring resistance to viral infection would be desired only under conditions of actual viral infection. Therefore, for some desired traits inducible expression of genes in transgenic plants will be desired.

[0320] Expression of a gene in a transgenic plant may be desired only in a certain time period during the development of the plant. Developmental timing is frequently correlated with tissue specific gene expression. For example, expression of zein storage proteins is initiated in the endosperm about 15 days after pollination.

[0321] Additionally, vectors may be constructed and employed in the intracellular targeting of a specific gene product within the cells of a transgenic plant or in directing a protein to the extracellular environment. This will generally be achieved by joining a DNA sequence encoding a transit or signal peptide sequence to the coding sequence of a particular gene. The resultant transit, or signal, peptide will transport the protein to a particular intracellular, or extracellular destination, respectively, and will then be post-translationally removed. Transit or signal peptides act by facilitating the transport of proteins through intracellular membranes, e.g., vacuole, vesicle, plastid and mitochondrial membranes, whereas signal peptides direct proteins through the extracellular membrane.

[0322] A particular example of such a use concerns the direction of a herbicide resistance gene, such as the EPSPS gene, to a particular organelle such as the chloroplast rather than to the cytoplasm. This is exemplified by the use of the rbcs transit peptide which confers plastid-specific targeting of proteins. In addition, it is proposed that it may be desirable to target certain genes responsible for male sterility to the mitochondria, or to target certain genes for resistance to phytopathogenic organisms to the extracellular spaces, or to target proteins to the vacuole.

[0323] It may be useful to target DNA itself within a cell. For example, it may be useful to target introduced DNA to the nucleus as this may increase the frequency of transformation. Within the nucleus itself it would be useful to target a gene in order to achieve site specific integration. For example, it would be useful to have an gene introduced through transformation replace an existing gene in the cell.

[0324] In order to improve the ability to identify transformants, one may desire to employ a selectable or screenable marker gene as, or in addition to, the expressible gene of interest. “Marker genes” are genes that impart a distinct phenotype to cells expressing the marker gene and thus allow such transformed cells to be distinguished from cells that do not have the marker. Such genes may encode either a selectable or screenable marker, depending on whether the marker confers a trait which one can select for by chemical means, i.e., through the use of a selective agent (e.g., a herbicide, antibiotic, or the like), or whether it is simply a trait that one can identify through observation or testing, i.e., by screening (e.g., the R-locus trait). Of course, many examples of suitable marker genes are known to the art and can be employed in the practice of the invention.

[0325] Included within the terms selectable or screenable marker genes are also genes which encode a “secretable marker” whose secretion can be detected as a means of identifying or selecting for transformed cells. Examples include markers which encode a secretable antigen that can be identified by antibody interaction, or even secretable enzymes which can be detected by their catalytic activity. Secretable proteins fall into a number of classes, including small, diffusible proteins detectable, e.g., by ELISA; small active enzymes detectable in extracellular solution (e.g., alpha-amylase, beta-lactamase, phosphinothricin acetyltransferase); and proteins that are inserted or trapped in the cell wall (e.g., proteins that include a leader sequence such as that found in the expression unit of extensin or tobacco PR-S).

[0326] With regard to selectable secretable markers, the use of a gene that encodes a protein that becomes sequestered in the cell wall, and which protein includes a unique epitope is considered to be particularly advantageous. Such a secreted antigen marker would ideally employ an epitope sequence that would provide low background in plant tissue, a promoter-leader sequence that would impart efficient expression and targeting across the plasma membrane, and would produce protein that is bound in the cell wall and yet accessible to antibodies. A normally secreted wall protein modified to include a unique epitope would satisfy all such requirements.

[0327] One example of a protein suitable for modification in this manner is extensin, or hydroxyproline rich glycoprotein (HPRG). For example, the maize HPRG (Steifel et al., The Plant Cell, 2:785 (1990)) molecule is well characterized in terms of molecular biology, expression and protein structure. However, any one of a variety of extensins and/or glycine-rich wall proteins (Keller et al., EMBO Journal, 8:1309 (1989)) could be modified by the addition of an antigenic site to create a screenable marker.

[0328] Selectable Markers

[0329] Possible selectable markers for use in connection with the present invention include, but are not limited to, a neo gene (Potrykus et al., Mol. Gen. Genet., 199:183 (1985)) which codes for kanamycin resistance and can be selected for using kanamycin, G418, and the like; a bar gene which codes for bialaphos resistance; a gene which encodes an altered EPSP synthase protein (Hinchee et al., Biotech., 6:915 (1988)) thus conferring glyphosate resistance; a nitrilase gene such as bxn from Klebsiella ozaenae which confers resistance to bromoxynil (Stalker et al., Science, 242:419 (1988)); a mutant acetolactate synthase gene (ALS) which confers resistance to imidazolinone, sulfonylurea or other ALS-inhibiting chemicals (European Patent Application 154,204, 1985); a methotrexate-resistant DHFR gene (Thillet et al., J. Biol. Chem., 263:12500 (1988)); a dalapon dehalogenase gene that confers resistance to the herbicide dalapon; or a mutated anthranilate synthase gene that confers resistance to 5-methyl tryptophan. Where a mutant EPSP synthase gene is employed, additional benefit may be realized through the incorporation of a suitable chloroplast transit peptide, CTP (European Patent Application 0,218,571, 1987).

[0330] An illustrative embodiment of a selectable marker gene capable of being used in systems to select transformants are the genes that encode the enzyme phosphinothricin acetyltransferase, such as the bar gene from Streptomyces hygroscopicus or the pat gene from Streptomyces viridochromogenes (U.S. patent application Ser. No. 07/565,844, which is incorporated by reference herein). The enzyme phosphinothricin acetyl transferase (PAT) inactivates the active ingredient in the herbicide bialaphos, phosphinothricin (PPT). PPT inhibits glutamine synthetase, (Murakami et al., Mol. Gen. Genet., 205:42 (1986); Twell et al., Plant Physiol., 91:1270 (1989)) causing rapid accumulation of ammonia and cell death. The success in using this selective system in conjunction with monocots was particularly surprising because of the major difficulties which have been reported in transformation of cereals (Potrykus, Trends Biotech., 7:269 (1989)).

[0331] Where one desires to employ a bialaphos resistance gene in the practice of the invention, a particularly useful gene for this purpose is the bar or pat genes obtainable from species of Streptomyces (e.g., ATCC No. 21,705). The cloning of the bar gene has been described (Murakami et al., Mol. Gen. Genet., 205:42 (1986); Thompson et al., EMBO Journal, 6:2519 (1987)) as has the use of the bar gene in the context of plants other than monocots (De Block et al., EMBO Journal, 6:2513 (1987); De Block et al., Plant Physiol., 91:694 (1989)).

[0332] Screenable Markers

[0333] Screenable markers that may be employed include, but are not limited to, a beta-glucuronidase or uidA gene (GUS) which encodes an enzyme for which various chromogenic substrates are known; an R-locus gene, which encodes a product that regulates the production of anthocyanin pigments (red color) in plant tissues (Dellaporta et al., in Chromosome Structure and Function, pp. 263-282 (1988)); a beta-lactamase gene (Sutcliffe, PNAS USA, 75:3737 (1978)), which encodes an enzyme for which various chromogenic substrates are known (e.g., PADAC, a chromogenic cephalosporin); a xylE gene (Zukowsky et al., PNAS USA, 80:1101 (1983)) which encodes a catechol dioxygenase that can convert chromogenic catechols; an α-amylase gene (Ikuta et al., Biotech., 8:241 (1990)); a tyrosinase gene (Katz et al., J. Gen. Microbiol., 129:2703 (1983)) which encodes an enzyme capable of oxidizing tyrosine to DOPA and dopaquinone which in turn condenses to form the easily detectable compound melanin; a β-galactosidase gene, which encodes an enzyme for which there are chromogenic substrates; a luciferase (lux) gene (Ow et al., Science, 234:856 (1986)), which allows for bioluminescence detection; or even an aequorin gene (Prasher et al., Biochem. Biophys. Res. Comm., 126:1259 (1985)), which may be employed in calcium-sensitive bioluminescence detection, or a green fluorescent protein gene (Niedz et al., Plant Cell Reports, 14: 403 (1995)).

[0334] Genes from the maize R gene complex are contemplated to be particularly useful as screenable markers. The R gene complex in maize encodes a protein that acts to regulate the production of anthocyanin pigments in most seed and plant tissue. A gene from the R gene complex was applied to maize transformation, because the expression of this gene in transformed cells does not harm the cells. Thus, an R gene introduced into such cells will cause the expression of a red pigment and, if stably incorporated, can be visually scored as a red sector. If a maize line carries dominant allelles for genes encoding the enzymatic intermediates in the anthocyanin biosynthetic pathway (C2, A1, A2, Bz1 and Bz2), but carries a recessive allele at the R locus, transformation of any cell from that line with R will result in red pigment formation. Exemplary lines include Wisconsin 22 which contains the rg-Stadler allele and TR112, a K55 derivative which is r-g, b, P1. Alternatively any genotype of maize can be utilized if the C1 and R alleles are introduced together.

[0335] A further screenable marker contemplated for use in the present invention is firefly luciferase, encoded by the lux gene. The presence of the lux gene in transformed cells may be detected using, for example, X-ray film, scintillation counting, fluorescent spectrophotometry, low-light video cameras, photon counting cameras or multiwell luminometry. It is also envisioned that this system may be developed for populational screening for bioluminescence, such as on tissue culture plates, or even for whole plant screening.

[0336] Genes of interest are reflective of the commercial markets and interests of those involved in the development of the crop. Crops and markets of interest changes, and as developing nations open up world markets, new crops and technologies will also emerge. In addition, as the understanding of agronomic traits and characteristics such as yield and heterosis increase, the choice of genes for transformation will change accordingly. General categories of genes of interest include, for example, those genes involved in information, such as zinc fingers, those involved in communication, such as kinases, and those involved in housekeeping, such as heat shock proteins. More specific categories of transgenes, for example, include genes encoding important traits for agronomics, insect resistance, disease resistance, herbicide resistance, sterility, grain characteristics, and commercial products. Genes of interest include, generally, those involved in starch, oil, carbohydrate, or nutrient metabolism, as well as those affecting kernel size, sucrose loading, zinc finger proteins, see, e.g., U.S. Pat. No. 5,789,538, WO 99/48909; WO 99/45132; WO 98/53060; WO 98/53057; WO 98/53058; WO 00/23464; WO 95/19431; and WO 98/54311, and the like.

[0337] Other sequences which may be linked to the gene of interest which encodes a polypeptide are those which can target to a specific organelle, e.g., to the mitochondria, nucleus, or plastid, within the plant cell. Targeting can be achieved by providing the polypeptide with an appropriate targeting peptide sequence, such as a secretory signal peptide (for secretion or cell wall or membrane targeting, a plastid transit peptide, a chloroplast transit peptide, a mitochondrial target peptide, a vacuole targeting peptide, or a nuclear targeting peptide, and the like. For examples of plastid organelle targeting sequences (see WO 00/12732). Plastids are a class of plant organelles derived from proplastids and include chloroplasts, leucoplasts, aravloplasts, and chromoplasts. The plastids are major sites of biosynthesis in plants. In addition to photosynthesis in the chloroplast, plastids are also sites of lipid biosynthesis, nitrate reduction to ammonium, and starch storage. And while plastids contain their own circular genome, most of the proteins localized to the plastids are encoded by the nuclear genome and are imported into the organelle from the cytoplasm.

[0338] Transgenes used with the present invention will often be genes that direct the expression of a particular protein or polypeptide product, but they may also be non-expressible DNA segments. As used herein, an “expressible gene” is any gene that is capable of being transcribed into RNA (e.g., mRNA, antisense RNA, etc.) or translated into a protein, expressed as a trait of interest, or the like, etc., and is not limited to selectable, screenable or non-selectable marker genes. The invention also contemplates that, where both an expressible gene that is not necessarily a marker gene is employed in combination with a marker gene, one may employ the separate genes on either the same or different DNA segments for transformation. In the latter case, the different vectors are delivered concurrently to recipient cells to maximize cotransformation.

[0339] The choice of the particular DNA segments to be delivered to the recipient cells will often depend on the purpose of the transformation. One of the major purposes of transformation of crop plants is to add some commercially desirable, agronomically important traits to the plant. Such traits include, but are not limited to, herbicide resistance or tolerance; insect resistance or tolerance; disease resistance or tolerance (viral, bacterial, fungal, nematode); stress tolerance and/or resistance, as exemplified by resistance or tolerance to drought, heat, chilling, freezing, excessive moisture, salt stress; oxidative stress; increased yields; food content and makeup; physical appearance; male sterility; drydown; standability; prolificacy; starch properties; oil quantity and quality; and the like. One may desire to incorporate one or more genes conferring any such desirable trait or traits, such as, for example, a gene or genes encoding herbicide resistance.

[0340] In certain embodiments, the present invention contemplates the transformation of a recipient cell with more than one advantageous transgene. Two or more transgenes can be supplied in a single transformation event using either distinct transgene-encoding vectors, or using a single vector incorporating two or more gene coding sequences. For example, plasmids bearing the bar and aroA expression units in either convergent, divergent, or colinear orientation, are considered to be particularly useful. Further preferred combinations are those of an insect resistance gene, such as a Bt gene, along with a protease inhibitor gene such as pinII, or the use of bar in combination with either of the above genes. Of course, any two or more transgenes of any description, such as those conferring herbicide, insect, disease (viral, bacterial, fungal, nematode) or drought resistance, male sterility, drydown, standability, prolificacy, starch properties, oil quantity and quality, or those increasing yield or nutritional quality may be employed as desired.

[0341] Herbicide Resistance

[0342] The genes encoding phosphinothricin acetyltransferase (bar and pat), glyphosate tolerant EPSP synthase genes, the glyphosate degradative enzyme gene gox encoding glyphosate oxidoreductase, deh (encoding a dehalogenase enzyme that inactivates dalapon), herbicide resistant (e.g., sulfonylurea and imidazolinone) acetolactate synthase, and bxn genes (encoding a nitrilase enzyme that degrades bromoxynil) are good examples of herbicide resistant genes for use in transformation. The bar and pat genes code for an enzyme, phoshinothricin acetyltransferase (PAT), which inactivates the herbicide phosphinothricin and prevents this compound from inhibiting glutamine synthetase enzymes. The enzyme 5-enolpyruvylshikimate 3-phosphate synthase (EPSP Synthase), is normally inhibited by the herbicide N-(phosphonomethyl)glycine (glyphosate). However, genes are known that encode glyphosate-resistant EPSP Synthase enzymes.

[0343] These genes are particularly contemplated for use in monocot transformation. The deh gene encodes the enzyme dalapon dehalogenase and confers resistance to the herbicide dalapon. The bxn gene codes for a specific nitrilase enzyme that converts bromoxynil to a non-herbicidal degradation product.

[0344] Insect Resistance An important aspect of the present invention concerns the introduction of insect resistance-conferring genes into plants. Potential insect resistance genes which can be introduced include Bacillus thuringiensis crystal toxin genes or Bt genes (Watrud et al., in Engineered Organisms and the Environment (1985)). Bt genes may provide resistance to lepidopteran or coleopteran pests such as European Corn Borer (ECB). Preferred Bt toxin genes for use in such embodiments include the CryIA(b) and CryIA(c) genes. Endotoxin genes from other species of B. thuringiensis which affect insect growth or development may also be employed in this regard.

[0345] The poor expression of prokaryotic Bt toxin genes in plants is a well-documented phenomenon, and the use of different promoters, fusion proteins, and leader sequences has not led to significant increases in Bt protein expression (Vaeck et al., Nature, 328:33 (1989); Barton et al., Plant Physiol., 85:1103 (1987)). It is therefore contemplated that the most advantageous Bt genes for use in the transformation protocols disclosed herein will be those in which the coding sequence has been modified to effect increased expression in plants, and more particularly, those in which maize preferred codons have been used. Examples of such modified Bt toxin genes include the variant Bt CryIA(b) gene termed IAb6 (Perlak et al., PNAS-USA, 88:3324 (1991)) and the synthetic CryIA(c) genes termed 1800a and 1800b.

[0346] Protease inhibitors may also provide insect resistance (Johnson et al., PNAS-USA, 86:9871 (1989)), and will thus have utility in plant transformation. The use of a protease inhibitor II gene, pinII, from tomato or potato is envisioned to be particularly useful. Even more advantageous is the use of a pinII gene in combination with a Bt toxin gene, the combined effect of which has been discovered by the present inventors to produce synergistic insecticidal activity. Other genes which encode inhibitors of the insects' digestive system, or those that encode enzymes or co-factors that facilitate the production of inhibitors, may also be useful. This group may be exemplified by oryzacystatin and amylase inhibitors, such as those from wheat and barley.

[0347] Also, genes encoding lectins may confer additional or alternative insecticide properties. Lectins (originally termed phytohemagglutinins) are multivalent carbohydrate-binding proteins which have the ability to agglutinate red blood cells from a range of species. Lectins have been identified recently as insecticidal agents with activity against weevils, ECB and rootworm (Murdock et al., Phytochemistry, 29:85 (1990); Czapla and Lang, J. Econ. Entomol., 83:2480 (1990)). Lectin genes contemplated to be useful include, for example, barley and wheat germ agglutinin (WGA) and rice lectins (Gatehouse et al., J. Sci. Food Agric., 35:373 (1984)), with WGA being preferred.

[0348] Genes controlling the production of large or small polypeptides active against insects when introduced into the insect pests, such as, e.g., lytic peptides, peptide hormones and toxins and venoms, form another aspect of the invention. For example, it is contemplated that the expression of juvenile hormone esterase, directed towards specific insect pests, may also result in insecticidal activity, or perhaps cause cessation of metamorphosis (Hammock et al., Nature, 344:458 (1990)).

[0349] Transgenic plants expressing genes which encode enzymes that affect the integrity of the insect cuticle form yet another aspect of the invention. Such genes include those encoding, e.g., chitinase, proteases, lipases and also genes for the production of nikkomycin, a compound that inhibits chitin synthesis, the introduction of any of which is contemplated to produce insect resistant maize plants. Genes that code for activities that affect insect molting, such those affecting the production of ecdysteroid UDP-glucosyl transferase, also fall within the scope of the useful transgenes of the present invention.

[0350] Genes that code for enzymes that facilitate the production of compounds that reduce the nutritional quality of the host plant to insect pests are also encompassed by the present invention. It may be possible, for instance, to confer insecticidal activity on a plant by altering its sterol composition. Sterols are obtained by insects from their diet and are used for hormone synthesis and membrane stability. Therefore alterations in plant sterol composition by expression of novel genes, e.g., those that directly promote the production of undesirable sterols or those that convert desirable sterols into undesirable forms, could have a negative effect on insect growth and/or development and hence endow the plant with insecticidal activity. Lipoxygenases are naturally occurring plant enzymes that have been shown to exhibit anti-nutritional effects on insects and to reduce the nutritional quality of their diet. Therefore, further embodiments of the invention concern transgenic plants with enhanced lipoxygenase activity which may be resistant to insect feeding.

[0351] The present invention also provides methods and compositions by which to achieve qualitative or quantitative changes in plant secondary metabolites. One example concerns transforming plants to produce DIMBOA which, it is contemplated, will confer resistance to European corn borer, rootworm and several other maize insect pests. Candidate genes that are particularly considered for use in this regard include those genes at the bx locus known to be involved in the synthetic DIMBOA pathway (Dunn et al., Can. J. Plant Sci., 61:583 (1981)).

[0352] Further genes encoding proteins characterized as having potential insecticidal activity may also be used as transgenes in accordance herewith. Such genes include, for example, the cowpea trypsin inhibitor (CpTI; Hilder et al., Nature, 330:160 (1987)) which may be used as a rootworm deterrent; genes encoding avermectin (Avermectin and Abamectin., Campbell, W. C., Ed., 1989; Ikeda et al., J. Bacteriol., 169:5612 (1987)) which may prove particularly useful as a corn rootworm deterrent; ribosome inactivating protein genes; and even genes that regulate plant structures.

[0353] Environment or Stress Resistance

[0354] Improvement of a plant's ability to tolerate various environmental stresses such as, but not limited to, drought, excess moisture, chilling, freezing, high temperature, salt, and oxidative stress, can also be effected through expression of heterologous, or overexpression of homologous genes. Benefits may be realized in terms of increased resistance to freezing temperatures through the introduction of an “antifreeze” protein such as that of the Winter Flounder (Cutler et al., J. Plant Physiol., 135:351 (1989)) or synthetic gene derivatives thereof. Improved chilling tolerance may also be conferred through increased expression of glycerol-3-phosphate acetyltransferase in chloroplasts (Murata et al., 1992; Wolter et al., EMBO Journal, 11:4685 (1992)). Resistance to oxidative stress (often exacerbated by conditions such as chilling temperatures in combination with high light intensities) can be conferred by expression of superoxide dismutase (Gupta et al., PNAS, 90:1629 (1993)), and may be improved by glutathione reductase (Bowler et al., Ann. Rev. Plant Physiol., 43:83 (1992)). Such strategies may allow for tolerance to freezing in newly emerged fields as well as extending later maturity higher yielding varieties to earlier relative maturity zones.

[0355] Expression of novel genes that favorably effect plant water content, total water potential, osmotic potential, and turgor can enhance the ability of the plant to tolerate drought. As used herein, the terms “drought resistance” and “drought tolerance” are used to refer to a plants increased resistance or tolerance to stress induced by a reduction in water availability, as compared to normal circumstances, and the ability of the plant to function and survive in lower-water environments, and perform in a relatively superior manner. In this aspect of the invention it is proposed, for example, that the expression of a gene encoding the biosynthesis of osmotically-active solutes can impart protection against drought. Within this class of genes are DNAs encoding mannitol dehydrogenase (Lee and Saier, J. Bacteriol., 153 (1982)) and trehalose-6-phosphate synthase (Kaasen et al., J. Bacteriol., 174:889 (1992)). Through the subsequent action of native phosphatases in the cell or by the introduction and coexpression of a specific phosphatase, these introduced genes will result in the accumulation of either mannitol or trehalose, respectively, both of which have been well documented as protective compounds able to mitigate the effects of stress. Mannitol accumulation in transgenic tobacco has been verified and preliminary results indicate that plants expressing high levels of this metabolite are able to tolerate an applied osmotic stress (Tarczynski et al., cited supra (1992), (1993)).

[0356] Similarly, the efficacy of other metabolites in protecting either enzyme function (e.g. alanopine or propionic acid) or membrane integrity (e.g., alanopine) has been documented (Loomis et al., J. Expt. Zool., 252:9 (1989)), and therefore expression of gene encoding the biosynthesis of these compounds can confer drought resistance in a manner similar to or complimentary to mannitol. Other examples of naturally occurring metabolites that are osmotically active and/or provide some direct protective effect during drought and/or desiccation include sugars and sugar derivatives such as fructose, erythritol (Coxson et al., Biotropica, 24:121 (1992)), sorbitol, dulcitol (Karsten et al., Botanica Marina, 35:11 (1992)), glucosylglycerol (Reed et al., J. Gen. Microbiol., 130:1 (1984); Erdmann et al., J. Gen. Microbiol., 138:363 (1992)), sucrose, stachyose (Koster and Leopold, Plant Physiol., 88:829 (1988); Blackman et al., Plant Physiol., 100:225 (1992)), ononitol and pinitol (Vernon and Bohnert, EMBO J., 11:2077 (1992)), and raffinose (Bernal-Lugo and Leopold, Plant Physiol., 98:1207 (1992)). Other osmotically active solutes which are not sugars include, but are not limited to, proline (Rensburg et al., 1993) and glycine-betaine (Wyn-Jones and Storey, In: Physiology and Biochemistry of Drought Resistance in Plants, Paleg et al. (eds.), pp. 171-204 (1981)). Continued canopy growth and increased reproductive fitness during times of stress can be augmented by introduction and expression of genes such as those controlling the osmotically active compounds discussed above and other such compounds, as represented in one exemplary embodiment by the enzyme myoinositol 0-methyltransferase.

[0357] It is contemplated that the expression of specific proteins may also increase drought tolerance. Three classes of Late Embryogenic Proteins have been assigned based on structural similarities (see Dure et al., Plant Mol. Biol., 12:475 (1989)). All three classes of these proteins have been demonstrated in maturing (i.e., desiccating) seeds. Within these 3 types of proteins, the Type-II (dehydrin-type) have generally been implicated in drought and/or desiccation tolerance in vegetative plant parts (i.e. Mundy and Chua, EMBO J., 7, 2279 (1988); Piatkowski et al., Plant Physiol., 94:1682 (1990); Yamaguchi-Shinozaki et al., Plant Cell Physiol., 33:217 (1992)). Recently, expression of a Type-III LEA (HVA-1) in tobacco was found to influence plant height, maturity and drought tolerance (Fitzpatrick, Gen. Engineering News, 22:7 (1993)). Expression of structural genes from all three groups may therefore confer drought tolerance. Other types of proteins induced during water stress include thiol proteases, aldolases and transmembrane transporters (Guerrero et al., Plant Mol. Biol., 15:11 (1990)), which may confer various protective and/or repair-type functions during drought stress. The expression of a gene that effects lipid biosynthesis and hence membrane composition can also be useful in conferring drought resistance on the plant.

[0358] Many genes that improve drought resistance have complementary modes of action. Thus, combinations of these genes might have additive and/or synergistic effects in improving drought resistance in maize. Many of these genes also improve freezing tolerance (or resistance); the physical stresses incurred during freezing and drought are similar in nature and may be mitigated in similar fashion. Benefit may be conferred via constitutive expression of these genes, but the preferred means of expressing these novel genes may be through the use of a turgor-induced promoter (such as the promoters for the turgor-induced genes described in Guerrero et al. (Plant Molecular Biology, 15:11 (1990)) and Shagan et al., Plant Physiol., 101:1397 (1993), which are incorporated herein by reference). Spatial and temporal expression patterns of these genes may enable maize to better withstand stress.

[0359] Expression of genes that are involved with specific morphological traits that allow for increased water extractions from drying soil would be of benefit. For example, introduction and expression of genes that alter root characteristics may enhance water uptake. Expression of genes that enhance reproductive fitness during times of stress would be of significant value. For example, expression of DNAs that improve the synchrony of pollen shed and receptiveness of the female flower parts, i.e., silks, would be of benefit. In addition, expression of genes that minimize kernel abortion during times of stress would increase the amount of grain to be harvested and hence be of value. Regulation of cytokinin levels in monocots, such as maize, by introduction and expression of an isopentenyl transferase gene with appropriate regulatory sequences can improve monocot stress resistance and yield (Gan et al., Science, 270:1986 (1995)).

[0360] Given the overall role of water in determining yield, it is contemplated that enabling plants to utilize water more efficiently, through the introduction and expression of novel genes, will improve overall performance even when soil water availability is not limiting. By introducing genes that improve the ability of plants to maximize water usage across a full range of stresses relating to water availability, yield stability or consistency of yield performance may be realized.

[0361] Disease Resistance

[0362] It is proposed that increased resistance to diseases may be realized through introduction of genes into a plant. It is possible to produce resistance to diseases caused by viruses, bacteria, fungi, root pathogens, insects and nematodes. It is also contemplated that control of mycotoxin producing organisms may be realized through expression of introduced genes.

[0363] Resistance to viruses may be produced through gene expression. For example, it has been demonstrated that expression of a viral coat protein in a transgenic plant can impart resistance to infection of the plant by that virus and perhaps other closely related viruses (Cuozzo et al., Bio/Technology, 6:549 (1988), Hemenway et al., EMBO Journal, 7:1273 (1988), Abel et al., Science, 232:738 (1986)). It is contemplated that expression of antisense genes targeted at essential viral functions may impart resistance to the virus. For example, an antisense gene targeted at the gene responsible for replication of viral nucleic acid may inhibit the replication and provide a plant with resistance to the virus. It is believed that interference with other viral functions through the use of antisense genes may also increase resistance to viruses.

[0364] It is proposed that increased resistance to diseases caused by bacteria and fungi may be realized through introduction of exogenous genes. It is contemplated that genes encoding so-called “peptide antibiotics,” pathogenesis related (PR) proteins, toxin resistance, and proteins affecting host-pathogen interactions such as morphological characteristics will be useful. Peptide antibiotics are polypeptide sequences which are inhibitory to growth of bacteria and other microorganisms. For example, the classes of peptides referred to as cecropins and magainins inhibit growth of many species of bacteria and fungi. It is proposed that expression of PR proteins in plants may be useful in conferring resistance to bacterial disease. These genes are induced following pathogen attack on a host plant and have been divided into at least five classes of proteins (Bol et al., Ann. Rev. Phytopath., 28:113 (1990)). Included amongst the PR proteins are beta-1,3-glucanases, chitinases, and osmotin and other proteins that are believed to function in plant resistance to disease organisms. Other genes have been identified that have antifungal properties, e.g., UDA (stinging nettle lectin) and hevein (Broakgert et al., Science, 245:1110 (1989); Barkai-Golan et al., Arch. Microbiol., 116:119 (1978)).

[0365] Grain Composition or Quality

[0366] Genes may be introduced into plants, particularly commercially important cereals such as maize, wheat or rice, to improve the grain for which the cereal is primarily grown. A wide range of novel transgenic plants produced in this manner may be envisioned depending on the particular end use of the grain.

[0367] For example, the largest use of maize grain is for feed or food. Introduction of genes that alter the composition of the grain may greatly enhance the feed or food value. The primary components of maize grain are starch, protein, and oil. Each of these primary components of maize grain may be improved by altering its level or composition. Several examples may be mentioned for illustrative purposes but in no way provide an exhaustive list of possibilities.

[0368] The protein of many cereal grains is suboptimal for feed and food purposes especially when fed to pigs, poultry, and humans. The protein is deficient in several amino acids that are essential in the diet of these species, requiring the addition of supplements to the grain. Limiting essential amino acids may include lysine, methionine, tryptophan, threonine, valine, arginine, and histidine. Some amino acids become limiting only after the grain is supplemented with other inputs for feed formulations. For example, when the grain is supplemented with soybean meal to meet lysine requirements, methionine becomes limiting. The levels of these essential amino acids in seeds and grain may be elevated by mechanisms which include, but are not limited to, the introduction of genes to increase the biosynthesis of the amino acids, decrease the degradation of the amino acids, increase the storage of the amino acids in proteins, or increase transport of the amino acids to the seeds or grain.

[0369] One mechanism for increasing the biosynthesis of the amino acids is to introduce genes that deregulate the amino acid biosynthetic pathways such that the plant can no longer adequately control the levels that are produced. This may be done by deregulating or bypassing steps in the amino acid biosynthetic pathway which are normally regulated by levels of the amino acid end product of the pathway. Examples include the introduction of genes that encode deregulated versions of the enzymes aspartokinase or dihydrodipicolinic acid (DHDP)-synthase for increasing lysine and threonine production, and anthranilate synthase for increasing tryptophan production. Reduction of the catabolism of the amino acids may be accomplished by introduction of DNA sequences that reduce or eliminate the expression of genes encoding enzymes that catalyse steps in the catabolic pathways such as the enzyme lysine-ketoglutarate reductase.

[0370] The protein composition of the grain may be altered to improve the balance of amino acids in a variety of ways including elevating expression of native proteins, decreasing expression of those with poor composition, changing the composition of native proteins, or introducing genes encoding entirely new proteins possessing superior composition. DNA may be introduced that decreases the expression of members of the zein family of storage proteins. This DNA may encode ribozymes or antisense sequences directed to impairing expression of zein proteins or expression of regulators of zein expression such as the opaque-2 gene product. The protein composition of the grain may be modified through the phenomenon of cosupression, i.e., inhibition of expression of an endogenous gene through the expression of an identical structural gene or gene fragment introduced through transformation (Goring et al., PNAS, 88:1770 (1991)). Additionally, the introduced DNA may encode enzymes which degrade zeins. The decreases in zein expression that are achieved may be accompanied by increases in proteins with more desirable amino acid composition or increases in other major seed constituents such as starch. Alternatively, a chimeric gene may be introduced that comprises a coding sequence for a native protein of adequate amino acid composition such as for one of the globulin proteins or 10 kD zein of maize and a promoter or other regulatory sequence designed to elevate expression of said protein. The coding sequence of said gene may include additional or replacement codons for essential amino acids. Further, a coding sequence obtained from another species, or, a partially or completely synthetic sequence encoding a completely unique peptide sequence designed to enhance the amino acid composition of the seed may be employed.

[0371] The introduction of genes that alter the oil content of the grain may be of value. Increases in oil content may result in increases in metabolizable energy content and density of the seeds for uses in feed and food. The introduced genes may encode enzymes that remove or reduce rate-limitations or regulated steps in fatty acid or lipid biosynthesis. Such genes may include, but are not limited to, those that encode acetyl-CoA carboxylase, ACP-acyltransferase, beta-ketoacyl-ACP synthase, plus other well known fatty acid biosynthetic activities. Other possibilities are genes that encode proteins that do not possess enzymatic activity such as acyl carrier protein. Genes may be introduced that alter the balance of fatty acids present in the oil providing a more healthful or nutritive feedstuff. The introduced DNA may also encode sequences that block expression of enzymes involved in fatty acid biosynthesis, altering the proportions of fatty acids present in the grain such as described below.

[0372] Genes may be introduced that enhance the nutritive value of the starch component of the grain, for example by increasing the degree of branching, resulting in improved utilization of the starch in cows by delaying its metabolism.

[0373] Besides affecting the major constituents of the grain, genes may be introduced that affect a variety of other nutritive, processing, or other quality aspects of the grain as used for feed or food. For example, pigmentation of the grain may be increased or decreased. Enhancement and stability of yellow pigmentation is desirable in some animal feeds and may be achieved by introduction of genes that result in enhanced production of xanthophylls and carotenes by eliminating rate-limiting steps in their production. Such genes may encode altered forms of the enzymes phytoene synthase, phytoene desaturase, or lycopene synthase. Alternatively, unpigmented white corn is desirable for production of many food products and may be produced by the introduction of DNA which blocks or eliminates steps in pigment production pathways.

[0374] Feed or food comprising some cereal grains possesses insufficient quantitities of vitamins and must be supplemented to provide adequate nutritive value. Introduction of genes that enhance vitamin biosynthesis in seeds may be envisioned including, for example, vitamins A, E, B.sub.12, choline, and the like. For example, maize grain also does not possess sufficient mineral content for optimal nutritive value. Genes that affect the accumulation or availability of compounds containing phosphorus, sulfur, calcium, manganese, zinc, and iron among others would be valuable. An example may be the introduction of a gene that reduced phytic acid production or encoded the enzyme phytase which enhances phytic acid breakdown. These genes would increase levels of available phosphate in the diet, reducing the need for supplementation with mineral phosphate.

[0375] Numerous other examples of improvement of cereals for feed and food purposes might be described. The improvements may not even necessarily involve the grain, but may, for example, improve the value of the grain for silage. Introduction of DNA to accomplish this might include sequences that alter lignin production such as those that result in the “brown midrib” phenotype associated with superior feed value for cattle.

[0376] In addition to direct improvements in feed or food value, genes may also be introduced which improve the processing of grain and improve the value of the products resulting from the processing. The primary method of processing certain grains such as maize is via wetmilling. Maize may be improved though the expression of novel genes that increase the efficiency and reduce the cost of processing such as by decreasing steeping time.

[0377] Improving the value of wetmilling products may include altering the quantity or quality of starch, oil, corn gluten meal, or the components of corn gluten feed. Elevation of starch may be achieved through the identification and elimination of rate limiting steps in starch biosynthesis or by decreasing levels of the other components of the grain resulting in proportional increases in starch. An example of the former may be the introduction of genes encoding ADP-glucose pyrophosphorylase enzymes with altered regulatory activity or which are expressed at higher level. Examples of the latter may include selective inhibitors of, for example, protein or oil biosynthesis expressed during later stages of kernel development.

[0378] The properties of starch may be beneficially altered by changing the ratio of amylose to amylopectin, the size of the starch molecules, or their branching pattern. Through these changes a broad range of properties may be modified which include, but are not limited to, changes in gelatinization temperature, heat of gelatinization, clarity of films and pastes, and the like. To accomplish these changes in properties, genes that encode granule-bound or soluble starch synthase activity or branching enzyme activity may be introduced alone or combination. DNA such as antisense constructs may also be used to decrease levels of endogenous activity of these enzymes. The introduced genes or constructs may possess regulatory sequences that time their expression to specific intervals in starch biosynthesis and starch granule development. Furthermore, it may be advisable to introduce and express genes that result in the in vivo derivatization, or other modification, of the glucose moieties of the starch molecule. The covalent attachment of any molecule may be envisioned, limited only by the existence of enzymes that catalyze the derivatizations and the accessibility of appropriate substrates in the starch granule. Examples of important derivations may include the addition of functional groups such as amines, carboxyls, or phosphate groups which provide sites for subsequent in vitro derivatizations or affect starch properties through the introduction of ionic charges. Examples of other modifications may include direct changes of the glucose units such as loss of hydroxyl groups or their oxidation to aldehyde or carboxyl groups.

[0379] Oil is another product of wetmilling of corn and other grains, the value of which may be improved by introduction and expression of genes. The quantity of oil that can be extracted by wetmilling may be elevated by approaches as described for feed and food above. Oil properties may also be altered to improve its performance in the production and use of cooking oil, shortenings, lubricants or other oil-derived products or improvement of its health attributes when used in the food-related applications. Novel fatty acids may also be synthesized which upon extraction can serve as starting materials for chemical syntheses. The changes in oil properties may be achieved by altering the type, level, or lipid arrangement of the fatty acids present in the oil. This in turn may be accomplished by the addition of genes that encode enzymes that catalyze the synthesis of novel fatty acids and the lipids possessing them or by increasing levels of native fatty acids while possibly reducing levels of precursors. Alternatively DNA sequences may be introduced which slow or block steps in fatty acid biosynthesis resulting in the increase in precursor fatty acid intermediates. Genes that might be added include desaturases, epoxidases, hydratases, dehydratases, and other enzymes that catalyze reactions involving fatty acid intermediates. Representative examples of catalytic steps that might be blocked include the desaturations from stearic to oleic acid and oleic to linolenic acid resulting in the respective accumulations of stearic and oleic acids.

[0380] Improvements in the other major cereal wetmilling products, gluten meal and gluten feed, may also be achieved by the introduction of genes to obtain novel plants. Representative possibilities include but are not limited to those described above for improvement of food and feed value.

[0381] In addition it may further be considered that the plant be used for the production or manufacturing of useful biological compounds that were either not produced at all, or not produced at the same level, in the plant previously. The novel plants producing these compounds are made possible by the introduction and expression of genes by transformation methods. The possibilities include, but are not limited to, any biological compound which is presently produced by any organism such as proteins, nucleic acids, primary and intermediary metabolites, carbohydrate polymers, etc. The compounds may be produced by the plant, extracted upon harvest and/or processing, and used for any presently recognized useful purpose such as pharmaceuticals, fragrances, industrial enzymes to name a few.

[0382] Further possibilities to exemplify the range of grain traits or properties potentially encoded by introduced genes in transgenic plants include grain with less breakage susceptibility for export purposes or larger grit size when processed by dry milling through introduction of genes that enhance gamma-zein synthesis, popcorn with improved popping quality and expansion volume through genes that increase pericarp thickness, corn with whiter grain for food uses though introduction of genes that effectively block expression of enzymes involved in pigment production pathways, and improved quality of alcoholic beverages or sweet corn through introduction of genes which affect flavor such as the shrunken gene (encoding sucrose synthase) for sweet corn.

[0383] Non-Protein-Expressing Sequences

[0384] DNA may be introduced into plants for the purpose of expressing RNA transcripts that function to affect plant phenotype yet are not translated into protein. Two examples are antisense RNA and RNA with ribozyme activity. Both may serve possible functions in reducing or eliminating expression of native or introduced plant genes.

[0385] Genes may be constructed or isolated, which when transcribed, produce antisense RNA that is complementary to all or part(s) of a targeted messenger RNA(s). The antisense RNA reduces production of the polypeptide product of the messenger RNA. The polypeptide product may be any protein encoded by the plant genome. The aforementioned genes will be referred to as antisense genes. An antisense gene may thus be introduced into a plant by transformation methods to produce a novel transgenic plant with reduced expression of a selected protein of interest. For example, the protein may be an enzyme that catalyzes a reaction in the plant. Reduction of the enzyme activity may reduce or eliminate products of the reaction which include any enzymatically synthesized compound in the plant such as fatty acids, amino acids, carbohydrates, nucleic acids and the like. Alternatively, the protein may be a storage protein, such as a zein, or a structural protein, the decreased expression of which may lead to changes in seed amino acid composition or plant morphological changes respectively. The possibilities cited above are provided only by way of example and do not represent the full range of applications.

[0386] Genes may also be constructed or isolated, which when transcribed produce RNA enzymes, or ribozymes, which can act as endoribonucleases and catalyze the cleavage of RNA molecules with selected sequences. The cleavage of selected messenger RNA's can result in the reduced production of their encoded polypeptide products. These genes may be used to prepare novel transgenic plants which possess them. The transgenic plants may possess reduced levels of polypeptides including but not limited to the polypeptides cited above that may be affected by antisense RNA.

[0387] It is also possible that genes may be introduced to produce novel transgenic plants which have reduced expression of a native gene product by a mechanism of cosuppression. It has been demonstrated in tobacco, tomato, and petunia (Goring et al, PNAS, 88, 1770-1774 (1991); Smith et al. Mol. Gen. Genet., 224:447 (1990); Napoli et al., Plant Cell, 2:279 (1990); van der Krol et al., Plant Cell, 2:291 (1990)) that expression of the sense transcript of a native gene will reduce or eliminate expression of the native gene in a manner similar to that observed for antisense genes. The introduced gene may encode all or part of the targeted native protein but its translation may not be required for reduction of levels of that native protein.

[0388] The transgenic plants produced herein are thus expected to be useful for a variety of commercial and research purposes. Transgenic plants can be created for use in traditional agriculture to possess traits beneficial to the grower (e.g., agronomic traits such as resistance to water deficit, pest resistance, herbicide resistance or increased yield), beneficial to the consumer of the grain harvested from the plant (e.g., improved nutritive content in human food or animal feed; increased vitamin, amino acid, and antioxidant content; the production of antibodies (passive immunization) and nutriceuticals), or beneficial to the food processor (e.g., improved processing traits). In such uses, the plants are generally grown for the use of their grain in human or animal foods. All parts of the plants, including stalks, husks, vegetative parts, and the like, may also have utility, including use as part of animal silage or for ornamental purposes. Often, chemical constituents (e.g., oils or starches) of maize and other crops are extracted for foods or industrial use and transgenic plants may be created which have enhanced or modified levels of such components.

[0389] Transgenic plants may also find use in the commercial manufacture of proteins or other molecules, where the molecule of interest is extracted or purified from plant parts, seeds, and the like. Cells or tissue from the plants may also be cultured, grown in vitro, or fermented to manufacture such molecules.

[0390] The transgenic plants may also be used in commercial breeding programs, or may be crossed or bred to plants of related crop species. Improvements encoded by the expression cassette may be transferred, e.g., from maize cells to cells of other species, e.g., by protoplast fusion.

[0391] The transgenic plants may have many uses in research or breeding, including creation of new mutant plants through insertional mutagenesis, in order to identify beneficial mutants that might later be created by traditional mutation and selection. An example would be the introduction of a recombinant DNA sequence encoding a transposable element that may be used for generating genetic variation. The methods of the invention may also be used to create plants having unique “signature sequences” or other marker sequences which can be used to identify proprietary lines or varieties.

[0392] Thus, the transgenic plants and seeds according to the invention can be used in plant breeding which aims at the development of plants with improved properties conferred by the expression cassette, such as tolerance of drought, disease, or other stresses. The various breeding steps are characterized by well-defined human intervention such as selecting the lines to be crossed, directing pollination of the parental lines, or selecting appropriate descendant plants. Depending on the desired properties different breeding measures are taken. The relevant techniques are well known in the art and include but are not limited to hybridization, inbreeding, backcross breeding, multiline breeding, variety blend, interspecific hybridization, aneuploid techniques, etc. Hybridization techniques also include the sterilization of plants to yield male or female sterile plants by mechanical, chemical or biochemical means. Cross pollination of a male sterile plant with pollen of a different line assures that the genome of the male sterile but female fertile plant will uniformly obtain properties of both parental lines. Thus, the transgenic seeds and plants according to the invention can be used for the breeding of improved plant lines which for example increase the effectiveness of conventional methods such as herbicide or pesticide treatment or allow to dispense with said methods due to their modified genetic properties. Alternatively new crops with improved stress tolerance can be obtained which, due to their optimized genetic “equipment”, yield harvested product of better quality than products which were not able to tolerate comparable adverse developmental conditions.

[0393] The invention will be further described by the following examples which are not intended to limit the scope of the invention.

### EXAMPLES

[0394] The invention will be further described by reference to the following detailed examples. These examples are provided for purposes of illustration only, and are not intended to be limiting unless otherwise specified. Standard recombinant DNA and molecular cloning techniques used here are well known in the art and are described in detail in Sambrook et al. (Molecular Cloning: A Laboratory Manual, Cold Spring Harbor Laboratory Press (1989)) and by Ausubel et al. (Current Protocols in Molecular Biology, Greene Publishing (1992)).

### Example 1

### Expression Profiling

[0395] 1.1 Creation of a GFP Marker Plasmid

[0396] A Green fluorescence protein (GFP) expression cassette is constructed which consists of a sGFP (Reichel et al., P.N.A.S., 93:5888 (1996)), regulated by a duplicated CaMV 35S RNA promoter and CaMV 35S terminator (Goodall G. J., Cell, 58:473 (1989)). The expression cassette is cloned into the GAL polylinker of pBIN19 (Bevan M., N.A.R., 12:8711 (1984)). The plasmid is designated p35S-GFP and shown in FIG. 1.

[0397] 1.2 Plant Transformation

[0398] The GFP vector described in Example 1 is transformed into Arabidopis thaliana plants of ecotype Columbia. The transformation is carried out by taking an “in-Planta Agrobacterium-mediated transformation” approach as described by N. Bechtold (“In planta Agrobacterium-mediated transformation of adult Arabidopsis thaliana plants by vacuum infiltration”; Methods in Molecular Biology, 82: 259-266, (1998)).

[0399] 1.3 Plant Growth Conditions

[0400] Plants are raised axenically on a medium consisting of ½-strength MS salts, 1% (w/v) sucrose, 500 mg/l MES, pH=5.7. The plants are grown from seed in a Phytotron (day length, 10 h; day temperature, 20° C.; night temperature, 16° C.; light Source, Biolux, Osram L58 W/72). Five weeks after germination, leaf tissue is harvested, frozen in liquid nitrogen, and stored at −70 C.

[0401] 1.4 Evaluation of PTGS in 35S-GFP Transformants

[0402] To evaluate PTGS in the resultant 35S-GFP transformants, GFP expression is monitored in transgenic plants by GFP excitation with UV light (approximate range of wavelengths 390 to 480 nm). Selection of transgenic lines showing PTGS is based on absence of GFP expression in mature plants that showed normal GFP expression in earlier stages of plant development. Based on this criterion, two lines designated as 8Z-2 and 5, which are homozygous for the T-DNA insert, show PTGS associated with greatly reduced GFP-mRNA levels detected by RNA blot hybridization as described by Sambrook et al. (Molecular Cloning, 2^{nd} edition. 1989). Line 8Z-2 shows PTGS in approximately 90-96% of sibling plants. Line 5 shows PTGS in approximately 30-50% of sibling plants.

[0403] DNA blot hybridization as described by Sambrook et al. (Molecular Cloning. 2^{nd} edition, 1989) reveals that post-transcriptionally silenced line 8Z-2 carries two copies of T-DNA. Further analysis based on polymerase chain reaction (PCR) and utilizing combinations of T-DNA specific primers (Kumar and Fladung (2000) BioTechniques 28: 1128-1137) shows that these two copies are arranged in a direct tandem repeat. Similarly, line 5 is shown to carry one full-length T-DNA and a second, truncated T-DNA copy arranged in an inverted tandem repeat. The genomic position of the T-DNA copies in line 8Z-2 is determined to be chromosome I, BAC F22L4, gene #11 by thermal asymmetric interlaced polymerase chain reaction (TAIL-PCR) (Liu et al. (1995) Plant Journal 8: 457-463) using the T-DNA specific primers LB1 (5′-ttc gga acc acc atc aaa cag g-3′, SEQ ID NO:253), LB2 (5′-ttg ctg caa ctc tct cag ggc c-3′, SEQ ID NO:254), and LB3 (5′-tca gct gtt gcc cgt ctc act-3′, SEQ ID NO:255) and the degenerate primer AD3 (5′-wgt gna gwa nca nag a-3′, where W=A/T and N=G/A/T/C, SEQ ID NO:256). The genomic position of the T-DNA copies in line 5 is determined to be linked to BAC F22L4 on chromosome 1.

[0404] 1.5 Preparation of RNA

[0405] Total RNA is prepared from the frozen samples using Qiagen RNeasy columns (Valencia, Calif.) and precipitated overnight at −20° C. after the addition of 0.25 volumes of 10M LiCl₂. Pellets are washed with 70% EtOH, air dried and resuspended in RNase-free water.

[0406] Alternatively, total RNA is prepared using the “Pine Tree method” (Chang et al., 1993) where 1 gram of the ground frozen sample is added to 5 ml of extraction buffer (2% hexadectltrimethylamminium bromide, 2% polyvilylpyrrolidone K 30, 100 mM Tris-HCl (pH 8.0), 25 mM EDTA, 2.0 M NaCl, 0.5 g/L spermidine and 2% beta-mercaptoethanol, previously warmed to 65° C.) and mixed by inversion and vortexing. The solution is extracted two times with an equal volume of chloroform:isoamyl alcohol and precipitated overnight at −20° C. after the addition of 0.25 volumes of 10M LiCl₂. Pellets are washed with 70% EtOH, air dried and resuspended in RNase-free water.

[0407] 1.6 Preparation of cDNA

[0408] First strand cDNA synthesis is accomplished at 42° C. for one hour using 5 μg of total RNA from Arabidopsis tissue, 100 pmol of an oligo dT₍₂₄₎ primer containing a 5′ T7 RNA polymerase promoter sequence [5′-GGCCAGTGAATTGTAATACGACTCACT-ATAGGGAGGCGG-(dT)₂₄-3′] (SEQ ID NO 780) synthesized by Genosys, and SuperScript II reverse transcriptase (RT) (Gibco/BRL).

[0409] First strand CDNA synthesis reactions performed with SuperScript II RT are carried out according to the manufacturer's recommendations using 50 mM Tris-HCl (pH 8.3), 75 mM KCl, 3 mM MgCl₂, 10 mM dithiotreitol (DTT), 0.5 mM dNTPs, and 200 units of RT enzyme.

[0410] The second cDNA strand is synthesized using 40 units of E. coli DNA polymerase I, 10 units of E. coli DNA ligase, and 2 units of RNase H in a reaction containing 25 mM Tris-HCl (pH 7.5), 100 mM KCl, 5 mM MgCl₂, 10 mM (NH4)SO₄, 0.15 mM β-NAD⁺, 1 mM dNTPs, and 1.2 mM DTT. The reaction proceeded at 16° C. for 2 hours and is terminated using EDTA. Double-stranded cDNA products are purified by phenol/chloroform extraction and ethanol precipitation.

[0411] 1. 7 Preparation of Biotinvlated cRNA Probes

[0412] Synthesized cDNAs (approximately 0.1 μg) are used as templates to produce biotinylated cRNA probes by in vitro transcription using T7 RNA Polymerase (ENZO BioArray High Yield RNA Transcript Labeling Kit). Labeled cRNAs are purified using affinity resin (Qiagen RNeasy Spin Columns) and randomly fragmented to produce molecules of approximately 35 to 200 bases. Fragmentation is achieved by incubation at 94° C. for 35 minutes in a buffer containing 40 mM Tris-acetate, pH 8.1, 100 mM potassium acetate, and 30 mM magnesium acetate.

[0413] 1.8 Array Hybridization

[0414] The labeled samples are mixed with 0.1 mg/mL sonicated herring sperm DNA in a hybridization buffer containing 100 mM 2-N-Morpholino-ethane-sulfonic acid (MES), 1 M NaCl, 20 mM EDTA, 0.01% Tween 20, denatured at 99° C. for 5 min, and equilibrated at 45° C. for 5 min before hybridization. The hybridization mix is then transferred to the Arabidopsis GeneChip genome array (Affymetrix) cartridge and hybridized at 45° C. for 16 h on a rotisserie at 60 rpm.

[0415] The hybridized arrays are then rinsed and stained in a fluidics station (Affymetrix). They are first rinsed with wash buffer A (6×SSPE (0.9 M NaCl, 0.06 M NaH₂PO₄, 0.006 M EDTA), 0.01% Tween 20, 0.005% Antifoam) at 25° C. for 10 min and incubated with wash buffer B (100 mM MES, 0.1 M NaCl, 0.01% Tween 20) at 50° C. for 20 min, then stained with Streptavidin Phycoerythrin (SAPE) (100 mM MES, 1 M NaCl, 0.05% Tween 20, 0.005% Antifoam, 10 mg/mL SAPE 2 mg/mL BSA) at 25° C. for 10 min, washed with wash buffer A at 25° C. for 20 min and stained with biotinylated anti-streptavidin antibody at 25° C. for 10 min. After staining, arrays are stained with SAPE at 25° C. for 10 min and washed with wash buffer A at 30° C. for 30 min. The probe arrays are scanned twice and the intensities are averaged with a Hewlett-Packard GeneArray Scanner.

[0416] 1.9 Data Analysis

[0417] GeneChip Suite 3.2 (Affymetrix) is used for data normalization. The overall intensity of all probe sets of each array is scaled to 100 so hybridization intensity of all arrays is equivalent. False positives are defined based on experiments in which samples are split, hybridized to GeneChip expression arrays and the results compared. A false positive is indicated if a probe set is scored qualitatively as an “Increase” or “Decrease” and quantitatively as changing by at least two fold and average difference is greater than 25. A significant change is defined as 2-fold change or above with an expression baseline of 25, which is determined as the threshold level according to the scaling.

[0418] The expression data of selected genes are then normalized. Briefly, the median of the expression level within each chip is calculated, and the difference between the average difference and median average difference is used as new value to measure the gene expression level. The expression data are also adjusted across different chip experiments according to the calculated medium. Normalized data (genes and arrays) are analysed by the self organization map (SOM) method (Tamayo et al., P.N.A.S., 96:2907 (1999), and then subject to heirachy cluster analysis (Eisen et al., P.N.A.S., 95:14863 (1998). By the cluster analysis, genes and chip experiments are clustered according to the expression levels.

[0419] 1.10 Identification of Gene Products that are Modulated by Posttranscriptional Gene Silencing

[0420] DNA microarray technology can be used to compare expression patterns of RNA in silent and high-expression tissues of well-characterized 35S-GFP Arabidopsis lines.

[0421] Two transgenic lines were generated using the same construct as described in Examples 1 and 2 above. Further selection identified individuals with high expression of transgene GFP, and with low expression of transgene, named H and L (designated as 8Z-2 and 5), respectively. There are two repeats, named 1 and 2. So, for example, AH1 refers to one of the replicates of a transgenic line from event A with high expression of GFP.

[0422] By this approach, those genes could be identified which show reproducible expression difference between the H and L lines, regardless of their genetic background (A and B).

[0423] RNA expression patterns were determined by comparision of replicate RNA samples from different pairs of high-expressing and silent leaves in comparable physiological and developmental states. RNA expression patterns were also compared from samples obtained from tissues harvested at different times in the silencing process to detect genes expressed at specific stages during initiation, maintenance and systemic spread of PTGS.

[0424] 1.11 Analysis of RNA Profiling Results

[0425] 1.11.1 Expression Profiles of the Two Transgenic Lines

[0426] A comparitive analysis was conducted among eight samples using AH1 as a baseline. Genes displaying significant changes were collected. These genes showed at least a 2-fold change, average difference above 25 (determined noise level), and were present in at least 1 sample. The expression data of selected genes were then normalized as described above.

[0427] By this approach, a total of 1830 genes from four samples were clustered into two groups according to the genetic background of the cell lines rather than the degree of PTGS. Two cell lines showed very distinct gene expression patterns. However, no obvious difference in gene expression pattern was observed between highly expressed lines and silent lines. A similar pattern was discovered using more stringent criteria: at least a 5-fold change, average difference above 50, and present at least in one sample. The clustering was again based on the genetic background of the transgenic lines. 44 genes were analyzed according to this method. The results indicated that a different approach was needed to identify genes associated with PTGS.

[0428] 1.11.2 Difference in Gene Expression Between Silent and Highly Expressed Lines

[0429] In order to detect the differences in gene expression in silent and highly expressed lines, a different strategy was used. Pair-wise comparisons were conducted between each silent and highly expressed cell line pair using the above stated selection criteria. Selected genes were pooled together, and SOM and heirachy cluster analyses were performed to identify the common expression pattern in different cell lines and replicates.

[0430] Using low stringent criteria, a total of 823 genes were selected. Four very distinct clusters of genes were identified. Two of the clusters contain genes preferentially expressed in silent lines, while the other two clusters contain genes preferentially expressed in the highly expressed lines. The range and average of the expression levels within each of the clusters were calculated and plotted in the inserted graph. An additional cluster analysis was performed with the selected data containing genes from these four clusters. 28 genes preferentially expressed in silent lines and 21 genes preferentially expressed in highly expressed lines were selected.

[0431] Using the high stringent criteria, a total of 145 genes were selected and analyzed.

[0432] 1.11.3 Statistical Analysis

[0433] The relative expression of genes in high-expressing (H) and silent (S) Arabidopsis plants transformed with a 35S-green fluorescent protein (GFP) reporter gene and in wild-type (W) Arabidopsis was compared. Normalized expression values were used to calculate average expression values for each probe set. Probe sets were selected that showed significant differences (one-sided t-test of means, p<0.05 [*] and p<0.005 [**], 3 replicates) between S and W samples or S and H samples. The relative expression levels S/W and S/H were calculated for the data subsets.

[0434] Two classes of PTGS-related genes were identified: 1) Genes induced in association with PTGS showing ca. 2-fold higher expression in S relative to H or relative to W (upregulated in silent lines). 2) Genes down-regulated in association with PTGS showing ca. 2-fold lower expression in S relative to H or relative to W (downregulated in silent lines).

[0435] 43 candidate genes were identified that showed increased expression in silent plants and 51 candidate genes showing decreased expression in silent plants.

[0436] 1.12 Gene Classes

[0437] Based on blast searches of DNA databases, these genes encode proteins or protein domains which fall into several classes: 1) Silencing-related RNA and DNA metabolism (e.g., RNA helicases, RNAses, reverse transcriptase, histones, histone acetyltransferases), 2) signal transduction (protein kinases, receptors, and calmodulin), 3) transcription factors, 4) stress-related and pathogenesis-related proteins, 5) general metabolism, and 6) Proteins without known function. Strongly induced genes that encode a reverse transcriptase-like protein (CAB43904) implicate synthesis of novel DNAs in PTGS. Induced genes that encode a histone acetyltransferase-like protein (CAA18725) provide a link between PTGS and transcriptional gene silencing. The strong correlation between silencing and changes in expression of a variety of stress-related and pathogenesis-related proteins indicates that PTGS involves plant responses similar to those associated with defense against microbial pathogens.

### Example 2

### Identification of Ortholozous Genes in Rice, Wheat Banana and Maize

[0438] In addition, the identification of the Arabidopsis genes provides a means to identify the corresponding homologs and orthologs in other plants, including commercially valuable food crops such as wheat, rice, banana, soy, and barley, maize and ornamental plants. BLASTN and BLASTP searches can be performed to identify such sequences. Searches to identify such sequences revealed the polynucleotide sequences set forth in Table 6

[0439] The Arabidopsis sequences were compared to two sets or rice sequences to identify homologs. One contained rice gene prediction mRNA sequences and the other rice cDNA ORF sequences. The comparison algorithm was a translated BLAST search, tblastx. The BLAST results were post processed using SCAN software with the default parameters. This processed data was then parsed to retrieve the top rice hit based on E-value. These rice sequences were then compared to sets of wheat, maize and banana clustered cDNA's using the same software process to retrieve the top hits from each set.

TABLE 1
Genes up-regulated in silent lines

| At | Gene | | Rice |
|---|---|---|---|
| SEQ | Chip | | SEQ |
| ID NO: | Probe No: | Description and public homologs | ID NO |
| 5 | 20297_AT | : gb\|AAD30627.1\|AC007153_19 (AC007153) Similar to | 201 |
| | | indole-3-acetate beta-glucosyltransferase [Arabidopsis | |
| | | thaliana] | |
| | | -AAF61647.1 AF190634 Nicotiana tabacum UDP- | |
| | | glucose:salicylic acid glucosyltransferase. | |
| | | -AAL09350.1 AF304430 Brassica napus | |
| | | thiohydroximate S-glucosyltransferase. | |
| 9 | 19983_AT | : Similar to Rab protein [Human] | 157 |
| 9 | 19983_AT | : Similar to Rab protein [Human] | 133 |
| 11 | 12951_AT | : gb\|AAD32867.1\|AC005489_5 (AC005489) F14N23.5 | |
| | | [Arabidopsis thaliana] | |
| 17 | 14176_AT | : No hits found less than or equal to 1e-15. | |
| 21 | 14170_AT | : gb\|AAF29406.1\|AC022354_5 (AC022354) unknown | 309 |
| | | protein [Arabidopsis thaliana] | |
| 21 | | | 29 |
| 23 | 18115_AT | : gb\|AAC64891.1\| (AC005388) Similar to T11J7.13 | 311 |
| | | gi\|2880051 putative protein kinase from Arabidopsis | |
| | | thaliana BAC gb\|AC002340 | |
| 23 | | | 39 |
| 35 | 14636_S_{—} | : gb\|AAF21072.1\|AC013258_10 (AC013258) thaumatin- | 315 |
| | AT, | like protein [Arabidopsis thaliana] | |
| | 16153_S_{—} | -AAF06347.1 AF195654 Vitis vinifera SCUTL2. | |
| | AT | thaumatin-like protein. | |
| | | -BAA28872.1 AB006009 Pyrus pyrifolia thaumatin- | |
| | | like protein precursor. PsTL1. | |
| 35 | | | 109 |
| 39 | 17073_S_{—} | : gb\|AAD20078.1\| (AC006836) putative steroid | 113 |
| | AT14643_{—} | sulfotransferase [Arabidopsis thaliana] | |
| | S_AT | -AAC63113.1 AF000307 Brassica napus steroid | |
| | | sulfotransferase 3. BnST3. | |
| | | -AAC63112.1 AF000306 Brassica napus steroid | |
| | | sulfotransferase 2. BnST2. | |
| 39 | | | 331 |
| 41 | 15950_AT | : gb\|AAD26911.1\|AC006429_1 (AC006429) unknown | 159 |
| | | protein [Arabidopsis thaliana] | |
| | | -AAD03487.1 AF028841 Medicago sativa proline- | |
| | | rich cell wall protein. | |
| | | -CAA47812.1 X67427 Pisum sativum ptxA. | |
| 41 | | | 49 |
| 45 | 15846_AT | : gb\| AAD15461.1\| (AC006067) unknown protein | |
| | , | [Arabidopsis thaliana] | |
| | 14704_S_{—} | | |
| | AT15847_{—} | | |
| | G_AT | | |
| 59 | 17894_AT | : gb\|AAD08938.1\| (AC005724) unknown protein | |
| | | [Arabidopsis thaliana] | |
| 61 | 13706_S_{—} | : gb\|AAD08939.1\| (AC005724) putative trehalose-6- | 329 |
| | AT | phosphate synthase [Arabidopsis thaliana] | |
| 61 | | | 81 |
| 65 | 20079_AT | : gb\|AAD21753.1\| (AC006569) putative AP2 domain | 327 |
| | | transcription factor [Arabidopsis thaliana] | |
| | | -BAA97123.1 AB016265 Nicotiana sylvestris ERF | |
| | | (EREBP); ethylene-responsive element binding factor for | |
| | | basic PR (Pathogenesis-related) gene of higher plant, | |
| | | ethylene-responsive element binding factor. nserf3. | |
| 65 | | | 139 |
| 69 | 20676_G_{—} | : gb\|AAD20920.1\| (AC006234) beta-expansin | 275 |
| | AT | [Arabidopsis thaliana] | |
| | | -AAA50175.1 U03860 Glycine max cytokinin | |
| | | induced message. cim1. submitter comments: has | |
| | | homology to a perennial ryegrass pollen allergen | |
| | | (M57476); extracellular protein;cytokinin induced mRNA. | |
| | | -AAG52887.1 AF333386 Nicotiana tabacum beta- | |
| | | expansin-like protein. PPAL. pollen allergen-like protein. | |
| 69 | | | 43 |
| 73 | 17386_AT | : gb\|AAD29802.1\|AC006264_10 (AC006264) putative | |
| | | proline-rich protein [Arabidopsis thaliana] | |
| | | -CAA04449.1 AJ000997 Solanum tuberosum | |
| | | proline-rich protein. gpp1 | |
| 75 | 15863_AT | : gb\|AAD20401.1\| (AC007019) unknown protein | 295 |
| | | [Arabidopsis thaliana] | |
| 75 | | | 121 |
| 81 | 14423_S_{—} | : gb\|AAD23672.1\|AC007070_21 (AC007070) unknown | 163 |
| | AT | protein [Arabidopsis thaliana] | |
| 81 | | | 129 |
| 83 | 15576_S_{—} | : gb\|AAC42256.1\| (AC005395) putative CCCH-type zinc | 65 |
| | AT | finger protein [Arabidopsis thaliana] | |
| 83 | | | 263 |
| 85 | 19951_AT | : gb\|AAC42241.1\| (AC005395) unknown protein | |
| | | [Arabidopsis thaliana] | |
| 91 | 12497_AT | : putative receptor-like protein kinase [Arabidopsis | 337 |
| | | thaliana] | |
| | | -CAC20842.1 AJ250467 Pinus sylvestris receptor | |
| | | protein kinase. upk. | |
| 91 | | | 131 |
| 107 | 19135_AT | : gb\|AAF14581.1\|AF188363_1 (AF188363) AnnAt4 | 289 |
| | | [Arabidopsis thaliana] | |
| | | -CAA06492.1 AJ005347 Cicer arietinum calcium- | |
| | | binding protein. annexin. | |
| 107 | | | 55 |
| 111 | 19848_S_{—} | : dbj\|BAA08282.1\| (D45848) calmodulin-related protein | 251 |
| | AT | [Arabidopsis thaliana] | |
| | | -AAF73157.1 AF150059 Brassica napus | |
| | | calmodulin. CaM1. involved in seed germination. | |
| | | -CAA61980.1 X89890 Bidens pilosa Calmodulin. | |
| 111 | | | 3 |
| 125 | 19315_AT | : gb\|AAC62875.1\| (AC005397) putative AP2 domain | 175 |
| | | transcription factor [Arabidopsis thaliana] | |
| 125 | | | 21 |
| 129 | 13019_S_{—} | : gb\|AAC34233.1\| (AC00441 1) putative RAV-like B3 | 317 |
| | AT | domain DNA binding protein [Arabidopsis thaliana] | |
| 129 | | | 57 |
| 131 | 14062_AT | : gb\|AAC63633.1\| (AC005309) unknown protein | 219 |
| | | [Arabidopsis thaliana] | |
| | | -AAD51854.1 AF178990 Vitis riparia stress | |
| | | related protein. SRP. | |
| | | -CAA11305.1 AJ223390 Hevea brasiliensis Hev b 3. hev | |
| | | b 3. | |
| 131 | | | 75 |
| 141 | 12541_AT | : emb\|CAA61485.1\| (X89192) DNA binding protein | 215 |
| | | [Arabidopsis thaliana] | |
| | | -CAB89831.1 AJ242853 Solanum tuberosum DNA | |
| | | binding protein. Dof zinc finger protein, dof1. | |
| | | -BAA78575.1 AB028132 Oryza sativa Dof zinc | |
| | | finger protein. | |
| 141 | | | 115 |
| 145 | 13212_S_{—} | : “emb\|CAB68132.1\| (AL137080) beta-1, 3-glucanase 2 | 221 |
| | AT, | (BG2) [Arabidopsis thaliana]” | |
| | 16578_S_{—} | -AAL30426.1 AF435089 Prunus persica beta-1,3- | |
| | AT | glucanase. Gns3. | |
| | | -AAL30425.1 AF435088 Prunus persica beta-1,3- | |
| | | glucanase. Gns2. | |
| 145 | | | 105 |
| 147 | 20345_AT | : “gb\|AAC72865.1\| (AF104919) similar to class I | 237 |
| | | chitinases (Pfam: PF00182, E = 1.2e-142, N = 1) | |
| | | [Arabidopsis thaliana]” | |
| | | -CAA57773.1 X82329 Arachis hypogaea chitinase | |
| | | (class II). chi2;1. | |
| | | -AAD54935.1 AF141373 Petroselinum crispum | |
| | | random hydrolysis of1,4-beta-acetamido-2-deoxy-D- | |
| | | glucoside linkages in chitin. chitinase precursor. Chi1-1. | |
| | | class II. | |
| 151 | 19181_S_{—} | : gb\|AAC39464.1\| (AF053065) late embryogenesis | 261 |
| | AT | abundant protein homolog [Arabidopsis thaliana] | |
| 151 | | | 47 |
| 153 | 17834_AT | : gb\|AAC28197.1\| (AF075598) contains similarity to | 243 |
| | | reverse transcriptases [Arabidopsis thaliana] | |
| | | -CAA73821.1 Y13391 Beta lomatogona reverse | |
| | | transcriptase. | |
| 167 | 18983_S_{—} | : emb\|CAB41722.1\| (AL049730) pEARLI 1-like protein | |
| | AT | [Arabidopsis thaliana] | |
| | | -BAA11855.1 D83227 Populus nigra extensin like | |
| | | protein. | |
| | | -BAA11854.1 D83226 Populus nigra extensin like | |
| | | protein. | |
| 169 | 20604_AT | : emb\|CAB40776.1\| (AL049608) putative protein | 291 |
| | | [Arabidopsis thaliana] | |
| | | -AAL25128.1 AF432499 Oryza sativa cellulose | |
| | | synthase-like protein OsCs1A9. | |
| | | -AAL25127.1 AF432498 Oryza sativa cellulose | |
| | | synthase-like protein OsCs1A6. | |
| 171 | 12540_S_{—} | : emb\|CAB10218.1\| (Z97336) hypothetical protein | 283 |
| | AT | [Arabidopsis thaliana] | |
| 179 | 14552_S_{—} | : emb\|CAA18725.1\| (AL022603) Lsd1 like protein | 151 |
| | AT | [Arabidopsis thaliana] | |
| 179 | | | 141 |
| 181 | 14114_F_{—} | : emb\|CAB36808.1\| (AL035527) subtilisin-like protease | 271 |
| | AT | [Arabidopsis thaliana] | |
| | | -AAG09442.1 AF200467 Oryza sativa subtilase. | |
| | | serine protease; subtilisin-like serine protease;SP1. | |
| | | -CAA10987.1 AJ222782 Hordeum vulgare | |
| | | subtilisin-like protease. | |
| 183 | 15319_AT | : emb\|CAA20471.1\| (AL031326) putative protein | 267 |
| | | [Arabidopsis thaliana] | |
| | | -BAA90634.1 AP001129 Oryza sativa ESTs | |
| | | AU029388(E30287),D49277(S16474) correspond to a | |
| | | region of the predicted gene.; Similar to | |
| | | Arabidopsis thaliana DNA chromosome 4, BAC clone | |
| | | F16G20, picA protein.(AL031326). | |
| 183 | | | 79 |
| 191 | 12302_AT | : emb\|CAB43904.1\| (AL078469) putative protein | 301 |
| | | [Arabidopsis thaliana] | |
| | | -AAL31076.1 AC091749 Oryza sativa putaive copia- | |
| | | like retrotransposon polyprotein,5′-partial. | |
| | | OSJNBb0008A05.28. | |
| 205 | 18355_AT | : emb\|C AA21470.1\| (AL031986) putative protein | 301 |
| | | [Arabidopsis thaliana] | |
| | | -AAL33552.1 AF436851 Cucumis melo RING-H2 | |
| | | zinc finger protein. | |
| 205 | | | 301 |
| 207 | 14032_AT | : emb\|CAB38204.1\| (AL035601) cytochrome P450-like | 145 |
| | | protein [Arabidopsis thaliana] | |
| | | -BAA22422.1 AB001379 Glycyrrhiza echinata | |
| | | cytochrome P450. CYP81E1. | |
| | | -BAA74465.1 AB022732 Glycyrrhiza echinata | |
| | | cytochrome P450. CYP Ge-31. | |
| 215 | 14646_S_{—} | : emb\|CAB43637.1\| (AL050351) AtRer1A [Arabidopsis | 325 |
| | AT | thaliana] | |
| 215 | | | 125 |
| 217 | : | : emb\|CAA18763.1\| (AL022605) puative protein | 245 |
| | 15243_AT | [Arabidopsis thaliana] | |
| 219 | 20480_S_{—} | : emb\|CAB38908.1\| (AL035708) cytochrome P450-like | 281 |
| | AT, | protein [Arabidopsis thaliana] | |
| | 20479_I_{—} | -AAD03415.1 AF069494 Sinapis alba converts | |
| | AT | tyrosine topara-hydrophenylacetaldoxime inpara- | |
| | | hydroxybenzylglucosinolate biosynthesis. cytochrome | |
| | | P450. CYP79B1. | |
| | | -AAA85440.1 U32624 Sorghum bicolor cytochrome | |
| | | P-450. CYP79. P450TYR;N-hydroxylase. | |
| 219 | | | 101 |
| 223 | 13710_AT | : No hits found less than or equal to 1e-15. | |
| 225 | 13277_I_{—} | : emb\|CAA74399.1\| (Y14070) Heat Shock Protein 17.6A | 273 |
| | AT | [Arabidopsis thaliana] | |
| | | -AAC14577.1 U72396 Lycopersicon esculentum | |
| | | class II small heat shock protein Le-HSP17.6. heat | |
| | | treatment. | |
| | | -AAA33670.1 M33901 Pisum sativum 17.7 kDa | |
| | | heat shock protein (hsp17.7). | |
| 225 | | | 89 |
| 229 | 15141_S_{—} | : dbj\|BAA22096.1\| (D85191) vegetative storage protein | 171 |
| | AT | [Arabidopsis thaliana] | |
| | | -CAA11075.1 AJ223074 Glycine max acid | |
| | | phosphatase. | |
| | | -AAA33967.1 M76981 Glycine max vegetative | |
| | | storage protein. vspA. | |
| 233 | 14116_AT | : “gb\|AAC26243.1\| (AF077407) contains similarity to | 247 |
| | | sugar transporters (Pfam: sugar_tr.hmm, score: 395.39) | |
| | | [Arabidopsis thaliana]” | |
| | | -CAB52689.1 AJ132224 Lycopersicon esculentum | |
| | | hexose transporter. ht2. | |
| | | -CAA09419.1 AJ010942 Lycopersicon esculentum | |
| | | hexose transporter protein. | |
| 233 | | | 51 |
| 235 | 18206_AT | : dbj\|BAA85261.1\| (AB033294) dihydroflavonol 4- | 149 |
| | | reductase [Arabidopsis thaliana] | |
| | | -CAA72420.1 Y11749 Vitis vinifera | |
| | | dihydroflavonol 4-reductase. dfr1. | |
| | | -CAA53578.1 X75964 Vitis vinifera | |
| | | dihydroflavonol reductase. DFR | |
| 235 | | | 93 |
| 237 | 20034_I_{—} | : emb\|CAB42601.1\| (A71607) unnamed protein product | 297 |
| | AT | [Arabidopsis thaliana] | |
| | | -BAB33033.1 AB056448 Vigna unguiculata CPRD2. | |
| | | -BAB68539.1 AB071704 Daucus carota (S)- | |
| | | reticuline oxidase-like protein | |
| 243 | 16620_S_{—} | : gb\|AAC05572.1\| (AF051338) xyloglucan | 149 |
| | AT | endotransglycosylase related protein [Arabidopsis | |
| | | thaliana] | |
| | | -AAA81350.1 L22162 Glycine max brassinosteroid- | |
| | | regulated protein. This translated sequence has significant | |
| | | homologyto MER5 _ARATH (pir JQ1022) and | |
| | | TMNXG1A_1 (gp X68254). | |
| 243 | | | 93 |
| 251 | 20471_AT | : AP2 domain containing protein RAP2.1 [Arabidopsis | 269 |
| | | thaliana] | |
| | | | 11 |
| | 12345_at | gb\|AAB67985.1\| (L36246) anoxia-induced protein | |
| | (L36246.2 | [Arabidopsis thaliana] | |
| | _AT) | -BAA78738.1 AB023482 Oryza sativa EST | |
| | | AU055776(S20048) corresponds to a region of | |
| | | thepredicted gene.; Similar to Arabidopsis thaliana | |
| | | AP2domain containing protein RAP2.10 mRNA, | |
| | | partialcds.(AF003103). | |
| | | -AAF76898.1 AF274033 Atriplex hortensis apetala2 | |
| | | domain-containing protein. | |

[0440] TABLE 2
Genes down-regulated in silent lines

| AT | Gene | | Rice |
|---|---|---|---|
| SEQ | Chip | | SEQ |
| ID NO | Probe No: | Description | ID NO |
| 1 | 16053_I_{—} | : emb\|CAA74639.1\| (Y14251) glutathione S-transferase | 189 |
| | AT, | [Arabidopsis thaliana] | |
| | 16054_S_{—} | -CAA55039.1 X78203 Hyoscyamus muticus | |
| | AT | glutathione transferase. | |
| 1 | | | 111 |
| 3 | 13604_AT | : gb\|AAB70431.1\| (AC000104) F19P19.10 [Arabidopsis | 339 |
| | | thaliana] | |
| 7 | 19078_AT | : gb\|AAC14036.1\| (AC003981) F22O13.10 [Arabidopsis | 249 |
| | | thaliana] | |
| 13 | 14043_AT | : gb\|AAD39282.1\|AC007576_5 (AC007576) Similar to | |
| | | DNA-binding proteins [Arabidopsis thaliana] | |
| | | -AAD16139.1 AF096299 Nicotiana tabacum DNA- | |
| | | binding protein 2. WRKY2. transcription factor; contains | |
| | | WRKY DNA-binding domain. | |
| | | -AAC37515.1 L44134 Cucumis sativus SPF1-like | |
| | | DNA-binding protein. | |
| 15 | 19424_AT | : gb\|AAC00588.1\| (AC002396) glucose-6-phosphate 1- | 209 |
| | | dehydrogenase [Arabidopsis thaliana] | |
| | | -AAB69317.1 AF012861 Petroselinum crispum | |
| | | plastidic glucose-6-phosphate dehydrogenase. pG6PDH. | |
| | | -AAF87216.1 AF231351 Nicotiana tabacum plastidic | |
| | | glucose 6-phosphate dehydrogenase. G6PDHP2. | |
| 19 | 18217_G_{—} | : gb\|AAF24959.1\|AC012375_22 (AC012375) T22C5.18 | 187 |
| | AT | [Arabidopsis thaliana] | |
| | | -AAD26942.1 AF119050 Datisca glomerata zinc- | |
| | | finger protein 1. zfp1. DgZFP1. | |
| | | -BAA05079.1 D26086 Petunia x hybrida zinc-finger | |
| | | protein. | |
| 19 | | | 123 |
| 25 | 16537_S_{—} | : dbj\|BAA28953.1\| (AB008111) Atrboh F [Arabidopsis | 259 |
| | AT | thaliana] | |
| | | -BAB68079.1 AP003560 Oryza sativa cytochrome | |
| | | b245 beta chain homolog rbohA. B1060H01.12. contains | |
| | | ESTsD40466(S2474), C72826(E2330), AU085905(E2330). | |
| | | -BAB70750.1 AB050660 Solanum tuberosum | |
| | | respiratory burst oxidase homolog. StrbohA. | |
| 25 | | | 13 |
| 27 | 14964_AT | : gb\|AAB60905.1\| (AC001229) F5I14.4 gene product | |
| | | [Arabidopsis thaliana] | |
| 29 | 15116_F_{—} | : gb\|AAD28243.1\|AF121356_1 (AF121356) | 205 |
| | AT | peroxiredoxin TPx2 [Arabidopsis thaliana] | |
| | | -AAD33602.1 AF133302 Brassica rapa subsp. | |
| | | pekinensis type 2 peroxiredoxin. PrxII. new type. | |
| | | -AAL35363.1 AF442385 Capsicum annuum | |
| | | thioredoxin peroxidase. CAPOT1 | |
| 29 | | | 7 |
| 31 | 14656_I_{—} | : gb\|AAC41678.1\| (L41244) thionin [Arabidopsis | |
| | AT | thaliana] | |
| | | -AAF21800.1 AF090836 Brassica rapa subsp. | |
| | | pekinensis | |
| | | : thionin. | |
| 33 | 17077_S_{—} | : gb\|AAA67927.1\| (U13949) AtHSP101 [Arabidopsis | 253 |
| | AT, | thaliana] | |
| | 13274_S_{—} | -AAA66338.1 L35272 Glycine max heat shock | |
| | AT | protein. SB100. 100 kDa. | |
| | | -AAC83688.2 AF083343 Nicotiana tabacum 101 kDa | |
| | | heat shock protein. HSP101 | |
| 33 | | | 119 |
| 37 | 14679_S_{—} | : gb\|AAD17441.1\| (AC006284) putative WRKY DNA- | 195 |
| | AT | binding protein [Arabidopsis thaliana] | |
| | | -AAD16139.1 AF096299 Nicotiana tabacum DNA- | |
| | | binding protein 2. WRKY2. transcription factor; contains | |
| | | WRKY DNA-binding domain. | |
| | | -AAC37515.1 L44134 Cucumis sativus SPF1-like | |
| | | DNA-binding protein. | |
| 37 | | | 63 |
| 43 | 14377_I_{—} | : gb\|AAD20103.1\| (AC006304) hypothetical protein | |
| | AT | [Arabidopsis thaliana] | |
| 47 | 17128_S_{—} | : gb\|AAC69381.1\| (AC005398) pathogenesis-related PR- | 173 |
| | AT, | 1-like protein [Arabidopsis | |
| | 14635_S_{—} | -AAB06458.1 U64806 Brassica napus | |
| | AT | pathogenesis-related protein PR1. Ypr1. | |
| | | -AAB01666.1 U21849 Brassica napus PR-1a. | |
| | | LSC94. | |
| 49 | 12768_AT | : gb\|AAD41977.1\|AC006438_9 (AC006438) unknown | |
| | | protein [Arabidopsis thaliana] | |
| 51 | 17832_S_{—} | : gb\|AAB82769.1\| (U94998) class 1 non-symbiotic | 165 |
| | AT | hemoglobin [Arabidopsis thaliana] | |
| | | -AAL09463.1 AF329368 Gossypium hirsutum non- | |
| | | symbiotic hemoglobin class 1. GLB1. | |
| | | -AAG29748.1 AF172172 Medicago sativa non- | |
| | | symbiotic hemoglobin. MHB1. | |
| 51 | | | 87 |
| 53 | 14965_AT | : gb\|AAB86507.1\| (AC002329) unknown protein | |
| | | [Arabidopsis thaliana] | |
| 55 | 19554_AT | : gb\|AAD32908.1\|AC007584_6 (AC007584) putative | 169 |
| | | mitotic control protein dis3 [Arabidopsis thaliana] | |
| | | -BAA85401.1 AP000615 Oryza sativa EST | |
| | | AU068209(C12438) corresponds to a region of | |
| | | the predicted gene.; similar to Dis3p protein - | |
| | | human.(JE0110). | |
| 57 | 15695_S_{—} | : gb\|AAD20121.1\| (AC006201) histoneb H1 [Arabidopsis | 277 |
| | AT | thaliana] | |
| | | -AAF64525.1 AF253416 Lycopersicon chilense | |
| | | histone H1 variant. | |
| | | -AAB03076.1 U01890 Lycopersicon pennellii: histone | |
| | | H1. | |
| 57 | | | 91 |
| 63 | 15132_S_{—} | : gb\|AAD30449.1\|AF121878_1 (AF121878) cytidine | 323 |
| | AT | deaminase [Arabidopsis thaliana] | |
| 67 | 12656_AT | : gb\|AAD21751.1\| (AC006569) unknown protein | 283 |
| | | [Arabidopsis thaliana] | |
| 71 | 12096_AT | : gb\|AAD20908.1\| (AC006234) unknown protein | |
| | | [Arabidopsis thaliana] | |
| 77 | 19386_AT | : No hits found less than or equal to 1e-15. | |
| | | -BAB41080.1 AB052729 Pisum sativum DNA- | |
| | | binding protein DF1.DF1 | |
| 79 | 17237_AT | : gb\|AAC32431.1\| (AC004786) unknown protein | 241 |
| | | [Arabidopsis thaliana] | |
| 79 | | | 5 |
| 87 | 12431_AT | : gb\|AAC31222.1\| (AC004747) putative heat shock | 35 |
| | | transcription factor [Arabidopsis thaliana] | |
| | | -CAA47870.1 X67601 Lycopersicon peruvianum | |
| | | heat stress transcription factor HSF30. hsf30. | |
| | | -CAA87076.1 Z46952 Glycine max heat shock | |
| | | transcription factor 21. HSF. | |
| 87 | | | 197 |
| 89 | 20491_AT | : gb\|AAC95203.1\| (AC004561) putative tropinone | 193 |
| | | reductase [Arabidopsis thaliana] | |
| | | -AAA33280.1 L20475 Datura stramonium 29kDa | |
| | | protein; high homology to aa sequence of tropinone | |
| | | reductases. | |
| | | -AAA33281.1 L20473 Datura stramonium catalyses | |
| | | a stereospecific reduction oftropinone to tropine. tropinone | |
| | | reductase-I. | |
| 89 | | | 127 |
| 93 | 15792_AT | : gb\|AAB67625.1\| (AC002341) hypothetical protein | 279 |
| | | [Arabidopsis thaliana] | |
| | | -BAA94212.1 AP001633 Oryza sativa Similar to | |
| | | Arabidopsis thaliana chromosome 1 BACF9K20 genomic | |
| | | sequence; F9K20.25 (AC005679). | |
| 93 | | | 77 |
| 95 | 14856_S_{—} | : gb\|AAC26691.1\| (AC004077) putative cytochrome | 233 |
| | AT | P450 [Arabidopsis thaliana] | |
| 97 | 17051_S_{—} | : gb\|AAD09952.1\| (AF098947) CTF2B [Arabidopsis | 287 |
| | AT | thaliana] | |
| 97 | | | 53 |
| 99 | 19051_AT | : gb\|AAD31582.1\|AC006922_14 (AC006922) putative | 135 |
| | | glucosyltransferase [Arabidopsis thaliana] | |
| 99 | | | 305 |
| 101 | 15982_S_{—} | : emb\|CAA66863.1\| (X98190) peroxidase ATP2a | 313 |
| | AT | [Arabidopsis thaliana] | |
| | | -BAB16317.1 AB049589 Avicennia marina secretory | |
| | | peroxidase. PER. | |
| | | -AAD37374.1 AF145348 Glycine max peroxidase. | |
| | | Prx2b | |
| 101 | | | 61 |
| 103 | 16461_I_{—} | : gb\|AAC28766.1\| (AC004683) peroxidase [Arabidopsis | 17 |
| | AT | thaliana] | |
| | 16462_S_{—} | -BAA14144.1 D90116 Armoracia rusticana: | |
| | AT | peroxidase isozyme. | |
| | | -AAA33377.1 M37156 Armoracia rusticana: | |
| | | HRPC1. | |
| 105 | 16963_AT | : gb\|AAC28765.1\| (AC004683) peroxidase [Arabidopsis | |
| | | thaliana] | |
| | | -BAA14144.1 D90116 Armoracia rusticana: | |
| | | peroxidase isozyme. | |
| | | -AAA33377.1 M37156 Armoracia rusticana: | |
| | | HRPC1. | |
| 109 | 17379_AT | : gb\|AAF18728.1\|AC018721_3 (AC018721) putative | 19 |
| | | CCCH-type zinc finger protein [Arabidopsis thaliana] | |
| 109 | | | 199 |
| 113 | 19363_AT | : gb\|AAD22993.1\|AC007087_12 (AC007087) unknown | 217 |
| | | protein [Arabidopsis thaliana] | |
| 113 | | | 117 |
| 115 | 20174_S_{—} | : gb\|AAD22125.1\|AC006224_7 (AC006224) unknown | 335 |
| | AT | protein [Arabidopsis thaliana] | |
| 117 | 19171_AT | : gb\|AAB64325.1\| (AC002335) putative trypsin inhibitor | |
| | | [Arabidopsis thaliana] | |
| | | -CAA58994.1 X84208 Sinapis alba trypsin inhibitor | |
| | | 2. mti-2. | |
| 119 | 17840_S_{—} | : gb\|AAB64049.1\| (AC002333) putative endochitinase | |
| | AT | [Arabidopsis thaliana] | |
| | | -AAK62047.1 AY035389 Brassica napus chitinase | |
| | | class 4-like protein. | |
| | | -AAB01665.1 U21848 Brassica napus chitinase | |
| | | class IV. LSC222 | |
| 121 | 15137_S_{—} | : gb\|AAB47973.1\| (U57320) blue copper-binding protein | 217 |
| | AT | II [Arabidopsis thaliana] | |
| | | -CAC39044.1 AJ307662 Oryza sativa uclacyanin 3- | |
| | | like protein. C345ERIPDM. | |
| | | -CAA80963.1 Z25471 Pisum sativum blue copper | |
| | | protein | |
| 123 | 20269_AT | : gb\|AAB82640.1\| (AC002387) putative pectinesterase | 117 |
| | | [Arabidopsis thaliana] | |
| | | -CAB57457.2 AJ249786 Nicotiana tabacum tobacco | |
| | | mosaic virus movement protein receptor. pectin | |
| | | methylesterase. pectin methylesterase. | |
| | | -CAA69206.1 Y07899 Carica papaya de- | |
| | | esterification of cell wall pectin, pectinesterase. spe1 | |
| 127 | 19999_S_{—} | : gb\|AAD20160.1\| (AC006418) unknown protein | |
| | AT, | [Arabidopsis thaliana] | |
| | 14094_S_{—} | | |
| | AT | | |
| 133 | 12332_S_{—} | : dbj\|BAA82810.1\| (AB023448) basic endochitinase | 225 |
| | AT, | [Arabidopsis thaliana] | |
| | 13211_S_{—} | -BAA82826.1 AB023464 Arabis gemmifera basic | |
| | AT | endochitinase. ChiB. | |
| | | -AAF69793.1 AF135153 Arabis parishii class I | |
| | | chitinase. | |
| 133 | | | 67 |
| 135 | 20239_G_{—} | : emb\|CAA52619.1\| (X74514) beta-fructofuranosidase | 333 |
| | AT, | [Arabidopsis thaliana] | |
| | 20238_AT | -AAA03516.1 M58362 Daucus carota beta- | |
| | | fructosidase. cell wall. | |
| | | -CAA79676.1 Z21486 Solanum tuberosum cleavage | |
| | | of sucrose to glucose and fructose. beta-fructofuranosidase. | |
| 137 | 14248_AT | : gb\|AAD31062.1\|AC007357_11 (AC007357) Strong | 31 |
| | | similarity to gb\|X97864 cytochrome P450 from A. thaliana | |
| | | -AAL24049.1 AF426451 Citrus sinensis cytochrome | |
| | | P450. | |
| | | -AAC39318.1 AF029858 Sorghum bicolor second | |
| | | multifunctional cytochrome P450 in the biosynthetic | |
| | | pathway of the cyanogenic glucoside dhurrin. Catalyzes the | |
| | | conversion of p-hydroxyphenylacetaldoxime top- | |
| | | hydroxymandelonitrile. cytochrome P450 CYP71E1. | |
| | | CYP71E1. No EST#s identified | |
| 137 | | | 181 |
| 139 | 15969_S_{—} | : emb\|CAB37193.1\| (AJ133036) peroxidase [Arabidopsis | 167 |
| | AT | thaliana] | |
| | | -AAA33378.1 M37157 Armoracia rusticana: | |
| | | HRPC2. | |
| | | -AAA33377.1 M37156 Armoracia rusticana: HRPC1 | |
| 139 | | | 59 |
| 143 | 13219_S_{—} | : emb\|CAA74930.1\| (Y14590) class IV chitinase | 211 |
| | AT | [Arabidopsis thaliana] | |
| | | -CAA40474.1 X57187 Phaseolus vulgaris chitinase. | |
| | | Chi4. | |
| | | -AAB65776.1 U97521 Vitis vinifera class IV | |
| | | endochitinase. VvChi4A | |
| 143 | | | 71 |
| 149 | 15924_AT | : gb\|AAD22658.1\|AC007138_22 (AC007138) predicted | 155 |
| | | protein of unknown function [Arabidopsis thaliana] | |
| 155 | 20716_AT | : “gb\|AAC35547.1\| (AF080120) contains similarity to | 179 |
| | | protein kinases (Pfam: pkinase.hmm, score: 24.94) | |
| | | [Arabidopsis thaliana]” | |
| | | -AAG31173.1 AF315714 Ipomoea nil COP1. | |
| | | -CAB89693.1 AJ276591 Pisum sativum represser of | |
| | | photomorphogenesis. constitutively photomorphogenic 1 | |
| | | protein. cop1 | |
| 157 | 12748_F_{—} | : emb\|CAB51416.1\| (AL096882) drought-inducible | 183 |
| | AT | cysteine proteinase RD21A precursor-like protein | |
| | | [A.thaliana] | |
| | | -CAB17076.1 Z99954 Phaseolus vulgaris protein | |
| | | hydrolysis. cysteine proteinase precursor. | |
| | | -CAA05894.1 AJ003137 Lycopersicon esculentum: | |
| | | cysteine protease. CYP1. C14 | |
| 157 | | | 107 |
| 159 | 16914_S_{—} | : emb\|CAB39936.1\| (AL049500) osmotin precursor | 229 |
| | AT | [Arabidopsis thaliana] | |
| | | -CAA09228.1 AJ010501 Cicer arietinum thaumatin- | |
| | | like protein PR-5b. | |
| | | -AAD55090.1 AF178653 Vitis riparia thaumatin. | |
| | | osmotin; pathogenesis-related protein. | |
| 159 | | | 41 |
| 161 | 14598_AT | : emb\|CAB45970.1\| (AL080318) putative protein | |
| | | [Arabidopsis thaliana] | |
| 163 | 17963_AT | : emb\|CAB41717.1\| (AL049730) pEARLI 1-like protein | 137 |
| | | [Arabidopsis thaliana] | |
| | | -AAD01800.1 AF026382 Fragaria x ananassa: | |
| | | HyPRP. proline-rich protein. | |
| | | -BAA11855.1 D83227 Populus nigra extensin like | |
| | | protein. | |
| 165 | 16150_S_{—} | : emb\|CAB41718.1\| (AL049730) pEARLI 1 [Arabidopsis | 25 |
| | AT | thaliana] | |
| | | -AAD01800.1 AF026382 Fragaria x ananassa: | |
| | | HyPRP. proline-rich protein. | |
| | | -AAC60566.1 S68113 Brassica napus proline-rich | |
| | | SAC51. This sequence comes from FIG. 3. | |
| 165 | | | 257 |
| 173 | 20421_AT | : emb\|CAB10242.1\| (Z97336) germin precursor oxalate | 235 |
| | | oxidase [Arabidopsis thaliana] | |
| | | -CAB55394.1 AL117264 Oryza sativa zwh0010.1. | |
| | | similar to Arabidopsis germin-like protein 6(AF032976); | |
| | | Method: conceptual translation with partialpeptide | |
| | | sequencing. | |
| | | -BAA78563.1 AB024338 Atriplex lentiformis: germin- | |
| | | like protein. | |
| 173 | | | 1 |
| 175 | 17899_AT | : emb\|CAB10339.1\| (Z97339) hypothetical protein | 341 |
| | | [Arabidopsis thaliana] | |
| 177 | 17485_S_{—} | : “emb\|CAB10405.1\| (Z97340) beta-1, 3-glucanase class I | 37 |
| | AT | precursor [Arabidopsis thaliana]” | |
| | | -CAB38443.1 AJ133470 Hevea brasiliensis: beta-1,3- | |
| | | glucanase. hgn1. | |
| | | -AAA87456.1 U22147 Hevea brasiliensis: beta-1,3- | |
| | | glucanase. HGN1. hydrolytic enzyme. | |
| 177 | | | 321 |
| 185 | 19850_AT | : emb\|CAA23068.1\| (AL035396) putative protein | 227 |
| | | [Arabidopsis thaliana] | |
| 187 | 12815_AT | : emb\|CAB43877.1\| (AL078467) putative protein | 293 |
| | | [Arabidopsis thaliana] | |
| 187 | | | 103 |
| 189 | 16003_S_{—} | : “emb\|CAA16877.1\| (AL021749) ADP, ATP carrier-like | 191 |
| | AT | protein [Arabidopsis thaliana]” | |
| | | -CAA41812.1 X59086 Zea mays adenine | |
| | | nucleotide translocator. MANT2. | |
| | | -AAB72047.1 AF006489 Gossypium hirsutum | |
| | | adenine nucleotide translocator 1. CANT1 | |
| 189 | | | 27 |
| 193 | 19182_AT | : emb\|CAA21214.1\| (AL031804) putative protein | 307 |
| | | [Arabidopsis thaliana] | |
| 195 | 17920_S_{—} | : emb\|CAA21216.1\| (AL031804) pyruvate | 223 |
| | AT | decarboxylase-1 (Pdc1) [Arabidopsis thaliana] | |
| | | -AAL37492.1 AF333772 Fragaria x ananassa: | |
| | | pyruvate decarboxylase. pdc1. | |
| | | -AAG13131.1 AF193791 Fragaria x ananassa: | |
| | | pyruvate decarboxylase. PDC | |
| 195 | | | 95 |
| 197 | 12933_R_{—} | : emb\|CAA65420.1\| (X96600) pathogenesis-related | 177 |
| | AT | protein 1 [Arabidopsis thaliana] | |
| | | -CAA30017.1 X06930 Nicotiana tabacum PR-1a | |
| | | protein (AA 1-168). | |
| | | -CAA31010.1 X12487 Nicotiana tabacum PR1c | |
| | | preprotein | |
| 197 | | | 23 |
| 199 | 20308_S_{—} | : “emb\|CAA20585.1\| (AL031394) pathogenesis-related | 85 |
| | AT | protein 1 precursor, 19.3K [Arabidopsis thaliana]” | |
| | | -CAA47374.1 X66942 Nicotiana tabacum prb-1b. | |
| | | PRB-1B. | |
| | | -AAK30143.1 AF348141 Capsicum annuum | |
| | | pathogenesis-related protein PR-1 precursor. | |
| 199 | | | 203 |
| 201 | 12070_S_{—} | : emb\|CAA18845.1] (AL023094) putative protein | 153 |
| | AT | [Arabidopsis thaliana] | |
| 201 | | | 143 |
| 203 | 19846_AT | : emb\|CAA18742.1\| (AL022604) putative protein | 255 |
| | | [Arabidopsis thaliana] | |
| | | -CAB61243.1 AJ239041 Lotus japonicus nodule | |
| | | organogenesis. nodule inception protein. nin. | |
| 209 | 17930_S_{—} | : emb\|CAA07352.1\| (AJ006960) peroxidase [Arabidopsis | 185 |
| | AT | thaliana] | |
| | | -CAA09881.1 AJ011939 Trifolium repens peroxidase. | |
| | | prx2. | |
| 211 | 16514_AT | : emb\|CAB37548.1\| (AL035538) putative protein | |
| | | [Arabidopsis thaliana] | |
| 213 | 19845_G_{—} | : emb\|CAB37510.1\| (AL035540) monooxygenase 2 | |
| | AT | (MO2) | |
| | | [Arabidopsis thaliana] | |
| 221 | 16916_S_{—} | : emb\|CAA54420.1\| (X77199) heat shock cognate 70-2 | 213 |
| | AT | [Arabidopsis thaliana] | |
| | | -AAB88009.1 AF035414 Brassica napus heat shock | |
| | | cognate protein HSC70. Hsc70. | |
| | | -CAA47948.1 X67711 Oryza sativa heat shock | |
| | | protein 70. hsp70 | |
| 221 | | | 97 |
| 227 | 17589_AT | : gb\|AAF00612.1\|AF156783_1 (AF156783) apyrase | 285 |
| | | [Arabidopsis thaliana] | |
| | | -AAG22044.1 AF305783 Pisum sativum apyrase 2. | |
| | | apy2. phosphatase. | |
| | | -AAF00610.1 AF156781 Dolichos biflorus apyrase. | |
| | | apyrase-2 | |
| 227 | | | 73 |
| 231 | 15125_F_{—} | : dbj\|BAA22095.1\| (D85190) vegetative storage protein | 231 |
| | AT | [Arabidopsis thaliana] | |
| | | -CAA11075.1 AJ223074 Glycine max acid | |
| | | phosphatase. | |
| | | -AAA33937.1 M37530 Glycine max 28 kDa | |
| | | protein | |
| 231 | | | 33 |
| 239 | 14621_AT | : gb\|AAC31244.1\| (AC004747) putative antifungal | |
| | | protein [Arabidopsis thaliana] | |
| | | -AAA69541.1 U18557 Raphanus sativus antifungal, | |
| | | fungistatic. antifungal protein 1 preprotein. Rs-AFP1. | |
| | | -BAB19054.1 AB012871 Wasabia japonica gamma- | |
| | | thionin1. | |
| 241 | 16091_S_{—} | : gb\|AAA32822.1\| (M62984) heat shock protein 83 | |
| | AT, | [Arabidopsis thaliana] | |
| | 13285_S_{—} | -AAA33748.1 M99431 Ipomoea nil heat shock | |
| | AT | protein 83. Hsp83A. | |
| | | -AAB26482.2 S59780 Zea mays heat shock protein | |
| | | HSP82. hsp82. 82 kda; This sequence comes from FIG. 3; | |
| | | conceptual translation differs from published | |
| | | sequence;mismatches(66[K->N],67[L->V],68[D->N]). | |
| 245 | 12876_S_{—} | : gb\|AAA97403.1\| (U33473) AGL8 [Arabidopsis | 303 |
| | AT | thaliana] | |
| | | -AAB41525.1 U25695 Sinapis alba transcription | |
| | | factor SaMADS B. MADS box protein. | |
| | | -CAA67969.1 X99655 Betula pendula MADS5 | |
| | | protein. MADS5 | |
| 247 | 15985_AT | : emb\|CAA67340.1\| (X98808) peroxidase ATP3a | 319 |
| | | [Arabidopsis thaliana] | |
| | | -CAA64413.1 X94943 Lycopersicon esculentum: | |
| | | peroxidase. cevi16. | |
| | | -AAA32676.1 M37637 Arachis hypogaea cationic | |
| | | peroxidase. PNC2. | |
| 247 | | | 15 |
| 249 | 20320_AT | : gb[AAC00628.1\| (AC002291) Similar to ‘MADS box’ | 161 |
| | | transcription factors [Arabidopsis thaliana] | |
| | | -CAB97354.1 AJ249146 Hordeum vulgare MADS- | |
| | | box protein 8. m8. | |
| | | -AAG43200.1 AF112150 Zea mays MADS box | |
| | | protein 3. mads3 | |
| 249 | | | 45 |

### Example 3

### Rice Orthologs of Arabidopsis PTGS Genes Identified by Reverse Genetics

[0441] Understanding the function of every gene is the major challenge in the age of completely sequenced eukaryotic genomes. Sequence homology can be helpful in identifying possible functions of many genes. However, reverse genetics, the process of identifying the function of a gene by obtaining and studying the phenotype of an individual containing a mutation in that gene, is another approach to identify the function of a gene.

[0442] Reverse genetics in Arabidopsis has been aided by the establishment of large publicly available collections of insertion mutants (Krysan et al., (1999) Plant Cell 11, 2283-2290; Tisser et al., (1999) Plant Cell 11, 1841-1852; Speulman et al., (1999). Plant Cell 11, 1853-1866; Parinov et al., (1999). Plant Cell 11, 2263-2270; Parinov and Sundaresan, 2000; Biotechnology 11, 157-161). Mutations in genes of interest are identified by screening the population by PCR amplification using primers derived from sequences near the insert border and the gene of interest to screen through large pools of individuals. Pools producing PCR products are confirmed by Southern hybridization and further deconvoluted into subpools until the individual is identified (Sussman et al., (2000) Plant Physiology 124, 1465-1467).

[0443] Recently, some groups have begun the process of sequencing insertion site flanking regions from individual plants in large insertion mutant populations, in effect prescreening a subset of lines for genomic insertion sites (Parinov et al., (1999). Plant Cell 11, 2263-2270; Tisser et al., (1999). Plant Cell 11, 1841-1852). The advantage to this approach is that the laborious and time-consuming process of PCR-based screening and deconvolution of pools is avoided.

[0444] A large database of insertion site flanking sequences from approximately 100,000 T-DNA mutagenized Arabidopsis plants of the Columbia ecotype (GARLIC lines) is prepared. T-DNA left border sequences from individual plants are amplified using a modified thermal asymmetric interlaced-polymerase chain reaction (TAIL-PCR) protocol (Liu et al., (1995). Plant J. 8, 457-463). Left border TAIL-PCR products are sequenced and assembled into a database that associates sequence tags with each of the approximately 100,000 plants in the mutant collection. Screening the collection for insertions in genes of interest involves a simple gene name or sequence BLAST query of the insertion site flanking sequence database, and search results point to individual lines. Insertions are confirmed using PCR.

[0445] Analysis of the GARLIC insert lines suggests that there are 76,856 insertions that localize to a subset of the genome representing coding regions and promoters of 22,880 genes. Of these, 49,231 insertions lie in the promoters of over 18,572 genes, and an additional 27,625 insertions are located within the coding regions of 13,612 genes. Approximately 25,000 T-DNA left border mTAIL-PCR products (25% of the total 102,765) do not have significant matches to the subset of the genome representing promoters and coding regions, and are therefore presumed to lie in noncoding and/or repetitive regions of the genome.

[0446] The Arabidopsis T-DNA GARLIC insertion collection is used to investigate the roles of certain genes involved in posttranscriptional gene silencing (“PTGS”). Target genes are chosen using a variety of criteria, including public reports of mutant phenotypes, RNA profiling experiments, and sequence similarity to genes implicated in PTGS. Plant lines with insertions in genes of interest are then identified. Each T-DNA insertion line is represented by a seed lot collected from a plant that is hemizygous for a particular T-DNA insertion. Plants homozygous for insertions of interest are identified using a PCR assay. The seed produced by these plants is homozygous for the T-DNA insertion mutation of interest.

[0447] Homozygous mutant plants are tested for altered posttranscriptional silencing behavior. The genes interrupted in these mutants contribute to the observed phenotype. The genes interrupted in these mutants interfere with the normal silencing status of the plant.

[0448] Rice orthologs of the Arabidopsis genes involved in posttranscriptional gene silencing are identified by similarity searching of a rice database using the Double-Affine Smith-Waterman algorithm (BLASP with e values better than ⁻¹⁰).

### Example 4

### Cloning and Sequencing of Nucleic Acid Molecules from Rice

[0449] 4.1 Genomic DNA: Plant genomic DNA samples are isolated from a collection of tissues. Individual tissues are collected from a minimum of five plants and pooled. DNA can be isolated according to one of the three procedures, e.g., standard procedures described by Ausubel et al. (1995), a quick leaf prep described by Klimyuk et al. (1993), or using FTA paper (Life Technologies).

[0450] For the latter procedure, a piece of plant tissue such as, for example, leaf tissue is excised from the plant, placed on top of the FTA paper and covered with a small piece of parafilm that serves as a barrier material to prevent contamination of the crushing device. In order to drive the sap and cells from the plant tissue into the FTA paper matrix for effective cell lysis and nucleic acid entrapment, a crushing device is used to mash the tissue into the FTA paper. The FTA paper is air dried for an hour. For analysis of DNA, the samples can be archived on the paper until analysis. Two mm punches are removed from the specimen area on the FTA paper using a 2 mm Harris Micro Punch and placed into PCR tubes. Two hundred (200) microliters of FTA purification reagent is added to the tube containing the punch and vortexed at low speed for 2 seconds. The tube is then incubated at room temperature for 5 minutes. The solution is removed with a pipette so as to repeat the wash one more time. Two hundred (200) microliters of TE (10 mM Tris, 0.1 mM EDTA, pH 8.0) is added and the wash is repeated two more times. The PCR mix is added directly to the punch for subsequent PCR reactions.

[0451] 4.2 Cloning of Candidate cDNA: A candidate cDNA is amplified from total RNA isolated from rice tissue after reverse transcription using primers designed against the computationally predicted cDNA. Primers designed based on the genomic sequence can be used to PCR amplify the full-length CDNA (start to stop codon) from first strand cDNA prepared from rice cultivar Nipponbare tissue.

[0452] The Qiagen RNeasy kit (Qiagen, Hilden, Germany) is used for extraction of total RNA. The Superscript II kit (Invitrogen, Carlsbad, USA) is used for the reverse transcription reaction. PCR amplification of the candidate CDNA is carried out using the reverse primer sequence located at the translation start of the candidate gene in 5′-3′ direction. This is performed with high-fidelity Taq polymerase (Invitrogen, Carlsbad, USA).

[0453] The PCR fragment is then cloned into pCR2.1-TOPO (Invitrogen) or the pGEM-T easy vector (Promega Corporation, Madison, Wis., USA) per the manufacturer's instructions, and several individual clones are subjected to sequencing analysis.

[0454] 4.3 DNA sequencing: DNA preps for 2-4 independent clones are miniprepped following the manufacturer's instructions (Qiagen). DNA is subjected to sequencing analysis using the BigDye™ Terminator Kit according to manufacturer's instructions (ABI). Sequencing makes use of primers designed to both strands of the predicted gene of interest. DNA sequencing is performed using standard dye-terminator sequencing procedures and automated sequencers (models 373 and 377; Applied Biosystems, Foster City, Calif.). All sequencing data are analyzed and assembled using the Phred/Phrap/Consed software package (University of Washington) to an error ratio equal to or less than 10⁻⁴ at the consensus sequence level.

[0455] The consensus sequence from the sequencing analysis is then to be validated as being intact and the correct gene in several ways. The coding region is checked for being full length (predicted start and stop codons present) and uninterrupted (no internal stop codons). Alignment with the gene prediction and BLAST analysis is used to ascertain that this is in fact the right gene.

[0456] The clones are sequenced to verify their correct amplification.

### Example 5

### Functional Analysis in Plants

### Example 5.1

### Plant Complementation Assay

[0457] A plant complementation assay can be used for the functional characterization of the PTGS genes according to the invention.

[0458] Rice and Arabidopsis putative orthologue pairs are identified using BLAST comparisons, TFASTXY comparisons, and Double-Affine Smith-Waterman similarity searches. Constructs containing a rice cDNA or genomic clone inserted between the promoter and terminator of the Arabidopsis orthologue are generated using overlap PCR (Gene 77, 61-68 (1989)) and GATEWAY cloning (Life Technologies Invitrogen). For ease of cloning, rice cDNA clones are preferred to rice genomic clones. A three stage PCR strategy is used to make these constructs.

[0459] (1) In the first stage, primers are used to PCR amplify: (i) 2 Kb upstream of the translation start site of the Arabidopsis orthologue, (ii) the coding region or cDNA of the rice orthologue, and (iii) the 500 bp immediately downstream of the Arabidopsis orthogue's translation stop site. Primers are designed to incorporate onto their 5′ ends at least 16 bases of the 3′ end of the adjacent fragment, except in the case of the most distal primers which flank the gene construct (the forward primer of the promoter and the reverse primer of the terminator). The forward primer of the promoters contains on their 5′ ends partial AttB1 sites, and the reverse primer of the terminators contains on their 5′ ends partial AttB2 sites, for Gateway cloning.

[0460] (2) In the second stage, overlap PCR is used to join either the promoter and the coding region, or the coding region and the terminator.

[0461] (3) In the third stage either the promoter-coding region product can be joined to the terminator or the coding region-terminator product can be joined to the promoter, using overlap PCR and amplification with fulll Att site-containing primers, to link all three fragments, and put full Att sites at the construct termini.

[0462] The fused three-fragment piece flanked by Gateway cloning sites are introduced into the LTI donor vector pDONR201 (Invitrogen) using the BP clonase reaction, for confirmation by sequencing. Confirmed sequenced constructs are introduced into a binary vector containing Gateway cloning sites, using the LR clonase reaction such as, for example, pAS200.

[0463] The pAS200 vector was created by inserting the Gateway cloning cassette RfA into the Acc65I site of pNOV3510.

[0464] pNOV3510 was created by ligation of inverted pNOV2114 VSI binary into pNOV3507, a vector containing a PTX5′ Arab Protox promoter driving the PPO gene with the Nos terminator.

[0465] pNOV2114 was created by insertion of virGN54D (Pazour et al. 1992, J. Bacteriol. 174:4169-4174) from pAD1289 (Hansen et al. 1994, PNAS 91:7603-7607) into pHiNK085.

[0466] pHiNK085 was created by deleting the 35S:PMI cassette and M13 ori in pVictorHiNK.

[0467] pPVictorHiNK was created by modifying the T-DNA of pVictor (described in WO 97/04112) to delete M13 derived sequences and to improve its cloning versatility by introducing the BIGLINK polylinker.

[0468] The sequence of the pVictor HiNK vector is disclosed in SEQ ID NO: 5 in WO 00/6837, which is incorporated herein by reference. The pVictorHiNK vector contains the following constituents that are of functional importance:

[0469] The origin of replication (ORI) functional in Agrobacterium is derived from the Pseudomonas aeruginosa plasmid pVS1 (Itoh et al 1984. Plasmid 11: 206-220; Itoh and Haas, 1985. Gene 36: 27-36). The pVS1 ORI is only functional in Agrobacterium and can be mobilised by the helper plasmid pRK2013 from E. coli into A. tumefaciens by means of a triparental mating procedure (Ditta et al., 1980. Proc. Natl. Acad. Sci USA 77: 7347-7351).

[0470] The ColE1 origin of replication functional in E. coli is derived from pUC 19 (Yannisch-Perron et al., 1985. Gene 33: 103-119).

[0471] The bacterial resistance to spectinomycin and streptomycin encoded by a 0.93 kb fragment from transposon Tn7 (Fling et al., 1985. Nucl. Acids Res. 13: 7095) functions as selectable marker for maintenance of the vector in E. coli and Agrobacterium. The gene is fused to the tac promoter for efficient bacterial expression (Amman et al., 1983. Gene 25: 167-178).

[0472] The right and left T-DNA border fragments of 1.9 kb and 0.9 kb that comprise the 24 bp border repeats, have been derived from the Ti-plasmid of the nopaline type Agrobacterium tumefaciens strains pTiT37 (Yadav et al., 1982. Proc. Natl. Acad. Sci. USA. 79: 6322-6326).

[0473] The plasmid is introduced into Agrobacterium tumefaciens GV3101pMP90 by electroporation. The positive bacterial transformants are selected on LB medium containing 50 μg/μl kanamycin and 25 μg/μl gentamycin. Plants are transformed by standard methodology (e.g., by dipping flowers into a solution containing the Agrobacterium) except that 0.02% Silwet -77 (Lehle Seeds, Round Rock, Tex.) is added to the bacterial suspension and the vacuum step omitted. Five hundred (500) mg of seeds are planted per 2 ft² flat of soil and, and progeny seeds are selected for transformants using PPO selection.

[0474] Primary transformants are analyzed for complementation. Primary transformants are genotyped for the Arabidopsis mutation and presence of the transgene. When possible, >50 mutants harboring the transgene should be phenotyped to observe variation due to transgene copy number and expression

### Example 5.2

### Complementation of a PTGS Deficiency of an Arabidopsis T-DNA Insertion Line by Overexpression of a Nucleotide Sequence Encoding a Polypeptide as Given in SEQ ID NOs: 328 and 317, Respectively to Confirm that a Polypeptide is Required for PTGS

[0475] A construction designed to overexpress a polypeptide according to SEQ ID NOs: 328 and 317, respectively is introduced into Arabidopsis plants, which have a T-DNA insertion in the respective genes encoding those proteins. The coding sequence is amplified by RT-PCR from RNA prepared from Arabidopsis leaves using appropriate primers. This coding sequence is then placed under the regulation of the strong, constitutive UBQ3 gene promoter (BAC F15A17, GenBank accession AL163002) in binary vector pCAMBIA-1380 (GenBank accession AF234301). The resultant expression vector is designated pCAND1.

[0476] For complementation studies, CAND1 transformants obtained by transformation of wild-type Arabidopsis plants with the vector pCAND1 are allowed to self-fertilize. The resultant T1 generation plants are tested for the hygromycin resistance phenotype to detect the presence of the CANDI T-DNA. The hygromycin-resistant plants are then allowed to self fertilize and the resultant T2 generation is scored for hygromycin-resistance to identify homozygous transformants with T-DNA inserts at a single locus.

[0477] Homozygous CAND1 transformants are then crossed with PTGS lines 8Z-2 and 5 to obtain F3 generation plants homozygous for both the 35S-GFP and CAND1 transgenes by using the methods described herein previously. By assaying these homozygous lines for GFP expression as described an increase in the fraction of plants exhibiting PTGS among the 8Z-2 CAND and 5 CAND plants may be detected compared with the original 8Z-2 and 5 lines, respectively.

### Example 6

### Insertion Mutagenesis in Rice

[0478] Example 6.1

### Insertion Mutagenesis in a Nucleotide Sequence Encoding a Transcription Factor Polypeptide in Rice

[0479] As described above in Examples 5.1 and 5.2, insertional mutatgeneis is used to direct reverse genetic screens. To assess the function of a polypeptide encoded by the nucleotide sequence set forth in SEQ ID NO: 328, a pool of independent tagged rice lines is screened by PCR utilizing pairs of primers corresponding to the T-DNA left border or retro-transposon tag Tos 17 and the SEQ ID NO: 328 3′-specific region. For T-DNA tagged line, the left border primer from A. tumefaciens T-DNA vector pD991 is represented by SEQ ID NO: 781 (5′-cat ttt ata ata acg ctg cgg aca tct ac -3′). (Krysan et al., 1999). A specific PCR product is identified and isolated. Sequencing of the PCR-amplified fragment reveals a T-DNA insertion in the predicted CDS region.

### Example 6.2

### Rice transgenic Line Exhibiting Post-transcriptional Silencing of a Green-fluorescent Protein Reporter Gene

[0480] Agrobacterium-mediated transformation methods known in the art and described in Example 8.1 below is used to obtain transgenic rice plants exhibiting PTGS. The Ti-plasmid used contains a chimeric green fluorescent protein (GFP) (Reichel et al. (1996) PNAS 93: 5888-93) reporter gene regulated by a duplicated cauliflower mosaic virus (CaMV) 35S RNA promoter and transcriptional terminator (Goodall and Filipowicz (1989) Cell 58: 473-483) in the binary vector pBIN19 (Bevan (1984) Nucl. Acids Res. 12: 8711-8721). The T-DNA region of this plasmid (p35S-GFP) is shown schematically in FIG. 1.

[0481] To evaluate PTGS in the resultant 35S-GFP transformants, GFP expression is monitored in transgenic plants by GFP excitation with UV light (approximate range of wavelengths 390 to 480 nm). Selection of transgenic lines showing PTGS is based on absence of GFP expression in mature plants that showed normal GFP expression in earlier stages of plant development. Based on this criterion, lines which are homozygous for the T-DNA insert, show PTGS associated with greatly reduced GFP-mRNA levels detected by RNA blot hybridization as described by Sambrook et al. (Molecular Cloning, 2^{nd} edition. 1989).

[0482] DNA blot hybridization as described by Sambrook et al. (Molecular Cloning. 2^{nd} edition, 1989) is used to determine the position of the T-DNA inserts.

### Example 6.3

### Analysis of the Expression of a Characterized Silenced Transgene in Rice Lines

[0483] The Rice line obtained in Example 6.1 is crossed with the line from Example 6.2 and the resultant F1 generation plants are allowed to self-fertilize to obtain the F2 generation. F2 plants are grown and tested for a presence of T-DNA insertion in the PTGS gene derived from the parental line and for the 35S-GFP T-DNA derived from the other parental line. The presence of the T-DNA insertion in the PTGS gene is demonstrated as described in Example 2. Plants homozygous for this T-DNA insertion are then checked for homozygosity by PCR using a 3′ specific primer and 36851TD#3 (5′-gct ccg ccc aca taa ttc aaa caa cac-3′, SEQ ID NO 782). These primers span a region of genomic DNA including the insertion site such that only the wild-type copy of DNA results in amplification of a genomic fragment. A similar strategy is used to screen for lines homozygous for the 35S-GFP T-DNA. First, the presence of the 35S-GFP T-DNA is demonstrated by using the T-DNA-specific PCR primer LB1 and the gene-specific PCR primer. Second, plants carrying the 35S-GFP T-DNA are tested for homozygosity by using the gene-specific primers. The plants homozygous for both the transgenes are allowed to self fertilize to obtain F3 generation plants. These plants and the parental line are scored for incidence of PTGS based on GFP fluorescence as described in Example 8.

### Example 7

### Vector Construction for Overexpression and Gene “Knockout” Experiments

[0484] 7.1 Overexpression

[0485] Vectors used for expression of full-length “PTGS candidate genes” of interest in plants (overexpression) are designed to overexpress the protein of interest and are of two general types, biolistic and binary, depending on the plant transformation method to be used.

[0486] For biolistic transformation (biolistic vectors), the requirements are as follows:

[0487] 1. a backbone with a bacterial selectable marker (typically, an antibiotic resistance gene) and origin of replication functional in Escherichia coli (E. coli; eg. ColE1), and

[0488] 2. a plant-specific portion consisting of:

[0489] a. a gene expression cassette consisting of a promoter (eg. ZmUBlint MOD), the gene of interest (typically, a full-length cDNA) and a transcriptional terminator (eg. Agrobacterium tumefaciens nos terminator);

[0490] b. a plant selectable marker cassette, consisting of a promoter (eg. rice Act1D-BV MOD), selectable marker gene (eg. phosphomannose isomerase, PMI) and transcriptional terminator (eg. CaMV terminator).

[0491] Vectors designed for transformation by Agrobacterium tumefaciens (A. tumefaciens; binary vectors) consist of:

[0492] 1. a backbone with a bacterial selectable marker functional in both E. coli and A. tumefaciens (eg. spectinomycin resistance mediated by the aadA gene) and two origins of replication, functional in each of aforementioned bacterial hosts, plus the A. tumefaciens virG gene;

[0493] 2. a plant-specific portion as described for biolistic vectors above, except in this instance this portion is flanked by A. tumefaciens right and left border sequences which mediate transfer of the DNA flanked by these two sequences to the plant.

[0494] 7.2 Knock Out Vectors

[0495] Vectors designed for reducing or abolishing expression of a single gene or of a family or related genes (knockout vectors) are also of two general types corresponding to the methodology used to downregulate gene expression: antisense or double-stranded RNA interference (dsRNAi).

[0496] (a) Anti-sense

[0497] For antisense vectors, a full-length or partial gene fragment (typically, a portion of the cDNA) can be used in the same vectors described for full-length expression, as part of the gene expression cassette. For antisense-mediated down-regulation of gene expression, the coding region of the gene or gene fragment will be in the opposite orientation relative to the promoter; thus, mRNA will be made from the non-coding (antisense) strand in planta.

[0498] (b) dsRNAi

[0499] For dsRNAi vectors, a partial gene fragment (typically, 300 to 500 basepairs long) is used in the gene expression cassette, and is expressed in both the sense and antisense orientations, separated by a spacer region (typically, a plant intron, eg. the OsSH1 intron 1, or a selectable marker, eg. conferring kanamycin resistance). Vectors of this type are designed to form a double-stranded mRNA stem, resulting from the basepairing of the two complementary gene fragments in planta.

[0500] Biolistic or binary vectors designed for overexpression or knockout can vary in a number of different ways, including eg. the selectable markers used in plant and bacteria, the transcriptional terminators used in the gene expression and plant selectable marker cassettes, and the methodologies used for cloning in gene or gene fragments of interest (typically, conventional restriction enzyme-mediated or Gateway™ recombinase-based cloning). An important variant is the nature of the gene expression cassette promoter driving expression of the gene or gene fragment of interest in most tissues of the plants (constitutive, eg. ZmUBlint MOD), in specific plant tissues (eg. maize ADP-gpp for endosperm-specific expression), or in an inducible fashion (eg. GAL4bsBz1 for estradiol-inducible expression in lines constitutively expressing the cognate transcriptional activator for this promoter).

[0501] 7.3. Insertion of a “PTGS Candidate Gene ” into an Over-Expression Vector

[0502] A validated rice CDNA clone prepared according to Example 13.1 comprising part or all of a nucleic acid sequence as given in the Sequence Lisitng in pCR2.1-TOPO is subcloned using conventional restriction enzyme-based cloning into a vector, downstream of the maize ubiquitin promoter and intron, and upstream of the Agrobacterium tumefaciens nos 3′ end transcriptional terminator. The resultant gene expression cassette (promoter, “PTGS candidate gene” and terminator) is further subcloned, using conventional restriction enzyme-based cloning, into the pNOV2117 binary vector (Negrotto et al (2000) Plant Cell Reports 19, 798-803; plasmid pNOV117 discosed in this article corresponds to pNOV2117 described herein; ; the nucleotide sequence of pNOV2117 is provided in SEQ ID NO: 44 of WO 01/73087), generating pNOVCAND.

[0503] The pNOVCAND binary vector is designed for transformation and over-expression of the “PTGS candidate gene” in monocots. It consists of a binary backbone containing the sequences necessary for selection and growth in Escherichia coli DH-5α (Invitrogen) and Agrobacterium tumefaciens LBA4404 (pAL4404; pSB1), including the bacterial spectinomycin antibiotic resistance aadA gene from E. coli transposon Tn7, origins of replication for E. coli (ColE1) and A. tumefaciens (VS 1), and the A. tumefaciens virG gene. In addition to the binary backbone, which is identical to that of pNOV2114 described herein previously (see Example 7 above), pNOV2117 contains the T-DNA portion flanked by the right and left border sequences, and including the Positech™ (Syngenta) plant selectable marker (WO 94/20627) and the “PTGS candidate gene” gene expression cassette. The Positech™ plant selectable marker confers resistance to mannose and in this instance consists of the maize ubiquitin promoter driving expression of the PMI (phosphomannose isomerase) gene, followed by the cauliflower mosaic virus transcriptional terminator.

[0504] Plasmid pNOV2117 is introduced into Agrobacterium tumefaciens LBA4404 (pAL4404; pSB1) by electroporation. Plasmid pAL4404 is a disarmed helper plasmid (Ooms et al (1982) Plasmid 7, 15-29). Plasmid pSB1 is a plasmid with a wide host range that contains a region of homology to pNOV2117 and a 15.2 kb KpnI fragment from the virulence region of pTiBo542 (Ishida et al (1996) Nat Biotechnol 14, 745-750). Introduction of plasmid pNOV2117 into Agrobacterium strain LBA4404 results in a co-integration of pNOV2117 and pSB1.

[0505] Alternatively, plasmid pCIB7613, which contains the hygromycin phosphotransferase (hpt) gene (Gritz and Davies, Gene 25, 179-188, 1983) as a selectable marker, may be employed for transformation.

[0506] Plasmid pCIB7613 (see WO 98/06860, incorporated herein by reference in its entirety) is selected for rice transformation. In pCIB7613, the transcription of the nucleic acid sequence coding hygromycin-phosphotransferase (HYG gene) is driven by the corn ubiquitin promoter (ZmUbi) and enhanced by corn ubiquitin intron 1. The 3′polyadenylation signal is provided by NOS 3′ nontranslated region.

[0507] Other useful plasmids include pNADII002 (GAL4-ER-VP16) which contains the yeast GAL4 DNA Binding domain (Keegan et al., Science, 231:699 (1986)), the mammalian estrogen receptor ligand binding domain (Greene et al., Science, 231:1150 (1986)) and the transcriptional activation domain of the HSV VP16 protein (Triezenberg et al.,1988). Both hpt and GAL4-ER-VP16 are constitutively expressed using the maize Ubiquitin promoter, and pSGCDL1 (GAL4BS Bz1 Luciferase), which carries the firefly luciferase reporter gene under control of a minimal maize Bronze1 (Bz1) promoter with 10 upstream synthetic GAL4 binding sites. All constructs use termination signals from the nopaline synthase gene.

### Example 8

### Plant Transformation

[0508] 8.1 Rice Transformation

[0509] pNOVCAND is transformed into a rice cultivar (Kaybonnet) using Agrobacterium-mediated transformation, and mannose-resistant calli are selected and regenerated.

[0510] Agrobacterium is grown on YPC solid plates for 2-3 days prior to experiment initiation. Agrobacterial colonies are suspended in liquid MS media to an OD of 0.2 at λ600 nm. Acetosyringone is added to the agrobacterial suspension to a concentration of 200 μM and agro is induced for 30 min.

[0511] Three-week-old calli which are induced from the scutellum of mature seeds in the N6 medium (Chu, C. C. et al., Sci, Sin., 18, 659-668(1975)) are incubated in the agrobacterium solution in a 100×25 petri plate for 30 minutes with occasional shaking. The solution is then removed with a pipet and the callus transfered to a MSAs medium which is overlayed with sterile filter paper.

[0512] Co-Cultivation is continued for 2 days in the dark at 22° C.

[0513] Calli are then placed on MS-Timetin plates for 1 week. After that they are transfered to PAA+ mannose selection media for 3 weeks.

[0514] Growing calli (putative events) are picked and transfered to PAA+ mannose media and cultivated for 2 weeks in light.

[0515] Colonies are tranfered to MS20SorbKinTim regeneration media in plates for 2 weeks in light. Small plantlets are transferred to MS20SorbKinTim regeneration media in GA7 containers. When they reach the lid, they are transfered to soil in the greenhouse.

[0516] Expression of the “PTGS candidate gene” in transgenic To plants is analyzed. Additional rice cultivars, such as but not limited to, Nipponbare, Taipei 309 and Fuzisaka 2 are also transformed and assayed for expression of the “PTGS candidate gene” product and enhanced protein expression.

[0517] 8.2 Maize Transformation

[0518] Transformation of immature maize embryos is performed essentially as described in Negrotto et al., (2000) Plant Cell Reports 19: 798-803. For this example, all media constituents are as described in Negrotto et al., supra. However, various media constituents described in the literature may be substituted.

[0519] 8.2.1 Transformation Plasmids and Selectable Marker

[0520] The genes used for transformation are cloned into a vector suitable for maize transformation as described in Example 17. Vectors used contain the phosphomannose isomerase (PMI) gene (Negrotto et al. (2000) Plant Cell Reports 19: 798-803).

[0521] 8.2.2 Preparation of Agrobacterium tumefaciens

[0522] Agrobacterium strain LBA4404 (pSB1) containing the plant transformation plasmid is grown on YEP (yeast extract (5 g/L), peptone (10 g/L), NaCl (5g/L),15 g/l agar, pH 6.8) solid medium for 2 to 4 days at 28° C. Approximately 0.8X 109 Agrobacteria are suspended in LS-inf media supplemented with 100 μM acetosyringone (As) (Negrotto et al.,(2000) Plant Cell Rep 19: 798-803). Bacteria are pre-induced in this medium for 30-60 minutes.

[0523] 8.2.3 Inoculation

[0524] Immature embryos from A188 or other suitable maize genotypes are excised from 8-12 day old ears into liquid LS-inf+ 100 μM As. Embryos are rinsed once with fresh infection medium. Agrobacterium solution is then added and embryos are vortexed for 30 seconds and allowed to settle with the bacteria for 5 minutes. The embryos are then transferred scutellum side up to LSAs medium and cultured in the dark for two to three days. Subsequently, between 20 and 25 embryos per petri plate are transferred to LSDc medium supplemented with cefotaxime (250 mg/l) and silver nitrate (1.6 mg/l) and cultured in the dark for 28° C. for 10 days.

[0525] 8.2.4 Selection of Transformed Cells and Regeneration of Transformed Plants

[0526] Immature embryos producing embryogenic callus are transferred to LSD1M0.5S medium. The cultures are selected on this medium for 6 weeks with a subculture step at 3 weeks. Surviving calli are transferred either to LSD1M0.5S medium to be bulked-up or to Reg1 medium. Following culturing in the light (16 hour light/8 hour dark regiment), green tissues are then transferred to Reg2 medium without growth regulators and incubated for 1-2 weeks. Plantlets are transferred to Magenta GA-7 boxes (Magenta Corp, Chicago Ill.) containing Reg3 medium and grown in the light. Plants that are PCR positive for the promoter-reporter cassette are transferred to soil and grown in the greenhouse.

### Example 9

### Overexpression of a Nucleotide Sequence of a Candidate Gene Encoding a Polypeptide as Given in SEO ID NOs: 152 and 142, Respectively in Arabidopsis

[0527] A transgenic construct designed to overexpress a polypeptide according to the invention as given in SEQ ID NOs: 328 and 317, respectively, is introduced into a transgenic line comprising a second transgene. A suitable line expresses the second transgene at a high level with no silencing or without complete silencing, preferably with less than half the plants showing silencing or with the silenced plants showing silencing to levels greater than 50% of the average levels of all the plants.

[0528] The transgenic construct is created by expressing the GUS marker gene (GenBank accession S69414), using the strong constitutive ACT2 promoter (GenBank accession U41998), with the CaMV 35S transcriptional terminator (nucleotides 2868 to 2938 in pJG304 (Guyer et al., 1998, Genetics 149:633-639)) in a binary T-DNA vector. This construct is introduced into Arabidopsis via Agrobacterium-mediated transformation. T2 plants from a single T1 plant expressing high levels of GUS activity are examined for silencing.

[0529] These T2 plants, or their progeny, are also transformed with one of two constructs. One construct allows overexpression of the candidate gene with a strong promoter and a transcriptional terminator different from those used in the construct described above. The other construct is a control that is essentially the same as the candidate gene construct, except that in place of a candidate gene, a marker gene, such as luciferase or GFP is overexpressed or no gene is overexpressed. These two binary vector constructs have a selectable marker that differs from the GUS construct, so that they can be used to superinfect with a second T-DNA construct. When each of these constructs is transformed into the T2 plants described above, the level of GUS expression is determined for the doubly-transformed T1 progeny. Those T1 plants overexpressing the candidate protein are expected to have lower levels of GUS expression due to increased silencing. If a difference is not detected in those T1 plants, lines homozygous for the candidate overexpression construct can be produced in the T2 generation and examined.

[0530] Alternatively, a nucleotide sequence set forth in any one of SEQ ID NOs provided in table 1 above is included in a construct as described above and is used for overexpression of the respective candidate polypeptide.

### Example 10

### Promoter Analysis

[0531] The gene chip experiment described above in Example 1 are designed to uncover genes that are expressed during PTGS. Candidate promoters are identified based upon the expression profiles of the associated transcripts representatives of which are provided in SEQ ID NOs: 1-341

[0532] Candidate promoters are obtained by PCR and fused to a GUS reporter gene containing an intron. Both histochemical and fluormetric GUS assays are carried out on stably transformed rice and maize plants and GUS activity is detected in the transformants.

[0533] Further, transient assays with the promoter::GUS constructs are carried out in rice embryogenic callus and GUS activity is detected by histochemical staining according the protocol described below.

[0534] 10.1 Construction of binary Promoter::Reporter Plasmids

[0535] To construct a binary promoter:: reporter plasmid for rice transformation a vector containing a promoter of interest (i.e., the DNA sequence 5′ of the initiation codon for the gene of interest) is used, which results from recombination in a BP reaction between a PCR product using the promoter of interest as a template and pDONR201™, producing an entry vector. The regulatory/promoter sequence is fused to the GUS reporter gene (Jefferson et al, 1987) by recombination using GATEWAY™ Technology according to manufacturers protocol as described in the Instruction Manual (GATEWAY™ Cloning Technology, GIBCO BRL, Rockville, Md. http://www.lifetech.com/).

[0536] Briefly, the Gateway Gus-intron-Gus (GIG)/NOS expression cassette is ligated into pNOV2117 binary vector in 5′ to 3′ orientation. The 4.1 kB expression cassette is ligated into the Kpn-I site of pNOV2117, then clones are screened for orientation to obtain pNOV2346, a GATEWAY™ adapted binary destination vector.

[0537] The promoter fragment in the entry vector is recombined via the LR reaction with the binary destination vector containing the GUS coding region with an intron that has an attR site 5′ to the GUS reporter, producing a binary vector with a promoter fused to the GUS reporter (pNOVCANDProm). The orientation of the inserted fragment is maintained by the att sequences and the final construct is verified by sequencing. The construct is then transformed into Agrobacterium tumefaciens strains by electroporation as described herein previously.

### Example 10.2

### Transient Expression Analysis of Candidate Promoters in Rice Embryogenic Callus

[0538] Materials

[0539] Embryogenic rice callus (Kaybonett cultivar)

[0540] LBA 4404 Agrobacterium strains

[0541] KCMS liquid media for re-suspending bacterial pellet

[0542] 200 mM stock (40 mg/ml) Acetosyringone

[0543] Sterile filter paper discs (8.5 mm in diameter)

[0544] LB spec liquid culture

[0545] MS-CIM media plates

[0546] MS-AS plates (co-cultivation plates)

[0547] MS-Tim plates (recovery plates)

[0548] Gus staining solution

[0549] Methods

[0550] Induction of Embryogenic Callus

[0551] 1. Sterilize mature Kaybonett rice seeds in 40% ultra Clorox, 1 drop Tween 20, for 40 min.

[0552] 2. Rinse with sterile water and plate on MS-CIM media (12 seeds/plate)

[0553] 3. Grow in dark for four weeks.

[0554] 4. Isolate embryogenic calli from scutellum to MS-CIM

[0555] 5. Let grow in dark 8 days before use for transformation

[0556] Agrobacterium Preparation and Induction

[0557] 1. Start 6 mL shaking cultures of LBA4404 Agrobacterium strains harboring rice promoter binary plasmids.

[0558] 2. Grow the cultures at room temperature for 48 hrs in the rotary shaker.

[0559] 3. Spin down the cultures at 8,000 rpm at 4° C. and re-suspend bacterial pellets in 10 ml of KCMS media supplemented with 100 μM Acetosyringone.

[0560] 4. Place in the shaker at room temp for 1 hr for induction of Agrobacterium virulence genes.

[0561] 5. In a sterile hood dilute Agrobacterium cultures 1:3 in KSMS media and transfer diluted cultures into deep petri dishes.

[0562] Inoculation of Plant Material and Staining

[0563] 6. In a sterile hood transfer embryogenic callus into diluted Agrobacerium solution and incubate for 30 minutes.

[0564] 7. In a sterile hood blot callus tissue on sterile filter paper and transfer on MS-AS plates.

[0565] 8. Co-culture plates in 22° C. growth chamber in the dark for two days.

[0566] 9. In a sterile hood transfer callus tissue to MS-Tim plates for the tissue recovery (the presence of Timentin will prevent Agrobacterium growth).

[0567] 10. Incubate tissue on MS-Tim media for two days at 22° C. in the dark.

[0568] 11. Remove callus tissue from the plates and stain for 48 hrs. in GUS staining solution.

[0569] 12. De-stain tissue in 70% EtOH for 24 hours.

[0570] Recipies

[0571] KCMS media (liquid), pH to 5.5

[0572] 100 ml/l MS Major Salts, 10 ml/l MS Minor Salts, 5 ml/l MS iron stock, 0.5M K₂HPO₄, 0.1 mg/ml Myo-Inositol,

[0573] 1.3 μg/ml Thiamine, 0.2 g/ml 2,4-D (1 mg/ml), 0.1 g/ml Kinetin, 3% Sucrose, 100 μM Acetosyringone

[0574] MS-CIM media, pH 5.8

[0575] MS Basal salt (4.3 g/L), B5 Vitamins (200×) (5 m/L), 2% Sucrose (20 g/L), Proline (500 mg/L), Glutamine (500 mg/L), Casein Hydrolysate (300 mg/L), 2 μg/ml 2,4-D, Phytagel (3 g/L)

[0576] MS-As Medium, pH 5.8

[0577] MS Basal salt (4.3 g/L), B5 Vitamins (200×) (5 m/L), 2% Sucrose (20 g/L), Proline (500 mg/L), Glutamine (500 mg/L), Casein Hydrolysate (300 mg/L), 2μg/ml 2,4-D, Phytagel (3 g/L), 200 μM Acetosyringone

[0578] MS-Tim media, pH 5.8

[0579] MS Basal salt (4.3 g/L), B5 Vitamins (200×) (5 m/L), 2% Sucrose (20 g/L), Proline (500 mg/L), Glutamine (500 mg/L), Casein Hydrolysate (300 mg/L), 2 μg/ml 2,4-D, Phytagel (3 g/L), 400 mg/l Timentin

[0580] Gus staining solution, pH 7

[0581] 0.3M Mannitol; 0.02M EDTA, pH=7.0; 0.04 NaH₂PO₄; 1 mM x-gluc

[0582] The binary Promoter: :Reporter Plasmids described in Example 10.1 above can also be used for stable transformation of rice and maize plants according to the protocols provided in Examples 8.1 and 8.2, respectively.

### Example 11

### Analysis of Mutant and Transgenic Plant Material

[0583] Two tiers of assays are can be used for analysis of the mutant and transgenic plant material.

[0584] Near InfraRed (NIR) Spectrophometric Analysis of Seeds

[0585] NIR enables evaluation of changes in starch, oil, protein and fiber content at very high throughput (1 sample/sec).

[0586] DIA or MRI Imaging

[0587] DIA or MRI imaging allows observation of gross morphology and surface area of major seed tissues and compartments (embryo, aleurone, endosperm, seed coat). Transgenic lines can also be physically sectioned and directly observed for changes in seed compartment morphology.

[0588] Lines showing alterations in grain composition will be advanced to a second tier of assays dependent upon the nature of the change detected:

[0589] 1) Protein track: 1-D and 2-D protein gels Protein profiles

[0590] HPLC Amino acid profiles

[0591] DNTB or papain staining Protein redox status

[0592] GC N/C/S ratios

[0593] 2) Starch track: Iodine staining Content, branching

[0594] Glucose-6-P analysis Phosphorylation level

[0595] 3) Oils track: GC Oil, fatty acid profile

### Example 12

### Chromosomal Markers to Identify the Location of a Nucleic Acid Sequence

[0596] The sequences of the present invention can also be used for SSR mapping. SSR mapping in rice has been described by Miyao et al. (DNA Res 3:233 (1996)) and Yang et al. (Mol Gen Genet 245:187 (1994)), and in maize by Ahn et al. (Mol Gen Genet 241:483 (1993)). SSR mapping can be achieved using various methods. In one instance, polymorphisms are identified when sequence specific probes flanking an SSR contained within a sequence are made and used in polymerase chain reaction (PCR) assays with template DNA from two or more individuals or, in plants, near isogenic lines. A change in the number of tandem repeats between the SSR-flanking sequence produces differently sized fragments (U.S. Pat. No. 5,766,847). Alternatively, polymorphisms can be identified by using the PCR fragment produced from the SSR-flanking sequence specific primer reaction as a probe against Southern blots representing different individuals (Refseth et al., Electrophoresis 18:1519 (1997)). Rice SSRs can be used to map a molecular marker closely linked to functional gene, as described by Akagi et al. (Genome 39:205 (1996)).

[0597] The sequences of the present invention can be used to identify and develop a variety of microsatellite markers, including the SSRs described above, as genetic markers for comparative analysis and mapping of genomes.

[0598] Many of the polynucleotides listed in Tables 2 to 11 contain at least 3 consecutive di-, tri- or tetranucleotide repeat units in their coding region that can potentially be developed into SSR markers. Trinucleotide motifs that can be commonly found in the coding regions of said polynucleotides and easily identified by screening the polynucleotides sequences for said motifs are, for example: CGG; GCC, CGC, GGC, etc. Once such a repeat unit has been found, primers can be designed which are complementary to the region flanking the repeat unit and used in any of the methods described below.

[0599] Sequences of the present invention can also be used in a variation of the SSR technique known as inter-SSR (ISSR), which uses microsatellite oligonucleotides as primers to amplify genomic segments different from the repeat region itself (Zietkiewicz et al., Genomics 20:176 (1994)). ISSR employs oligonucleotides based on a simple sequence repeat anchored or not at their 5′- or 3′-end by two to four arbitrarily chosen nucleotides, which triggers site-specific annealing and initiates PCR amplification of genomic segments which are flanked by inversely orientated and closely spaced repeat sequences. In one embodiment of the present invention, microsatellite markers as disclosed herein, or substantially similar sequences or allelic variants thereof, may be used to detect the appearance or disappearance of markers indicating genomic instability as described by Leroy et al. (Electron. J Biotechnol, 3(2), at http://www.ejb.org (2000)), where alteration of a fingerprinting pattern indicated loss of a marker corresponding to a part of a gene involved in the regulation of cell proliferation. Microsatellite markers are useful for detecting genomic alterations such as the change observed by Leroy et al. (Electron. J Biotechnol, 3(2), supra (2000)) which appeared to be the consequence of microsatellite instability at the primer binding site or modification of the region between the microsatellites, and illustrated somaclonal variation leading to genomic instability. Consequently, sequences of the present invention are useful for detecting genomic alterations involved in somaclonal variation, which is an important source of new phenotypes.

[0600] In addition, because the genomes of closely related species are largely syntenic (that is, they display the same ordering of genes within the genome), these maps can be used to isolate novel alleles from wild relatives of crop species by positional cloning strategies. This shared synteny is very powerful for using genetic maps from one species to map genes in another. For example, a gene mapped in rice provides information for the gene location in maize and wheat.

### Example 13

### Quantitative Trait Linked Breeding

[0601] Various types of maps can be used with the sequences of the invention to identify Quantitative Trait Loci (QTLs) for a variety of uses, including marker-assisted breeding.

[0602] Many important crop traits are quantitative traits and result from the combined interactions of several genes. These genes reside at different loci in the genome, often on different chromosomes, and generally exhibit multiple alleles at each locus. Developing markers, tools, and methods to identify and isolate the QTLs involved in a trait, enables marker-assisted breeding to enhance desirable traits or suppress undesirable traits. The sequences disclosed herein can be used as markers for QTLs to assist marker-assisted breeding. The sequences of the invention can be used to identify QTLs and isolate alleles as described by Li et al. in a study of QTLs involved in resistance to a pathogen of rice. (Li et al., Mol Gen Genet 261:58 (1999)). In addition to isolating QTL alleles in rice, other cereals, and other monocot and dicot crop species, the sequences of the invention can also be used to isolate alleles from the corresponding QTL(s) of wild relatives. Transgenic plants having various combinations of QTL alleles can then be created and the effects of the combinations measured. Once an ideal allele combination has been identified, crop improvement can be accomplished either through biotechnological means or by directed conventional breeding programs. (Flowers et al., J Exp Bot 51:99 (2000); Tanksley and McCouch, Science 277:1063 (1997)).

### Example 14

### Marker-Assisted Breeding

[0603] Markers or genes associated with specific desirable or undesirable traits are known and used in marker assisted breeding programs. It is particularly beneficial to be able to screen large numbers of markers and large numbers of candidate parental plants or progeny plants. The methods of the invention allow high volume, multiplex screening for numerous markers from numerous individuals simultaneously.

[0604] Markers or genes associated with specific desirable or undesirable traits are known and used in marker assisted breeding programs. It is particularly beneficial to be able to screen large numbers of markers and large numbers of candidate parental plants or progeny plants. The methods of the invention allow high volume, multiplex screening for numerous markers from numerous individuals simultaneously.

[0605] A multiplex assay is designed providing SSRs specific to each of the markers of interest. The SSRs are linked to different classes of beads. All of the relevant markers may be expressed genes, so RNA or cDNA techniques are appropriate. RNA is extracted from root tissue of 1000 different individual plants and hybridized in parallel reactions with the different classes of beads. Each class of beads is analyzed for each sample using a microfluidics analyzer. For the classes of beads corresponding to qualitative traits, qualitative measures of presence or absence of the target gene are recorded. For the classes of beads corresponding to quantitative traits, quantitative measures of gene activity are recorded. Individuals showing activity of all of the qualitative genes and highest expression levels of the quantitative traits are selected for further breeding steps. In procedures wherein no individuals have desirable results for all the measured genes, individuals having the most desirable, and fewest undesirable, results are selected for further breeding steps. In either case, progeny are screened to further select for homozygotes with high quantitative levels of expression of the quantitative traits.

### Example 15

### Method of Modifying the Gene Frequency

[0606] The invention further provides a method of modifying the frequency of a gene in a plant population, including the steps of: identifying an SSR within a coding region of a gene; screening a plurality of plants using the SSR as a marker to determine the presence or absence of the gene in an individual plant; selecting at least one individual plant for breeding based on the presence or absence of the gene; and breeding at least one plant thus selected to produce a population of plants having a modified frequency of the gene. The identification of the SSR within the coding region of a gene can be accomplished based on sequence similarity between the nucleic acid molecules of the invention and the region within the gene of interest flanking the SSR.

TABLE 3
This table illustrates the start and end points and the
sequence of tri- and tetra-nucleotide repeat units in
the coding region of a selection of SEQ ID NOs.

| SeqID | Start | End | Sequence |
|---|---|---|---|
| 9 | 429 | 443 | CCG |
| 13 | 580 | 594 | CCG |
| 19 | 548 | 562 | CGC |
| | 1031 | 1048 | GCG |
| 21 | 155 | 172 | ATG |
| | 507 | 521 | CGC |
| | 579 | 593 | GTC |
| | 752 | 766 | CCG |
| 39 | 762 | 776 | ACC |
| 49 | 280 | 294 | CGG |
| 61 | 63 | 80 | AGG |
| 63 | 579 | 593 | CGG |
| 69 | 65 | 79 | CGG |
| 71 | 755 | 769 | CCG |
| 93 | 27 | 41 | CGC |
| 115 | 437 | 451 | GCG |
| 129 | 124 | 141 | AGC |
| 131 | 89 | 103 | CGC |
| 145 | 752 | 769 | CCG |
| 159 | 487 | 501 | CCG |
| 161 | 612 | 626 | CAG |
| 175 | 163 | 183 | GGT |
| 181 | 58 | 72 | CTC |
| | 852 | 866 | CGG |
| 199 | 482 | 496 | CGC |
| | 964 | 981 | GCG |
| 205 | 284 | 298 | AGC |
| 211 | 165 | 179 | CGG |
| 215 | 46 | 60 | AAC |
| | 68 | 82 | AGC |
| | 134 | 151 | GCG |
| | 550 | 567 | ACG |
| 217 | 17 | 37 | ACC |
| 225 | 366 | 380 | CGC |
| 229 | 65 | 82 | CCG |
| 231 | 85 | 99 | CCG |
| 237 | 73 | 87 | ACC |
| | 282 | 302 | CGG |
| 239 | 61 | 78 | CTG |
| 259 | 347 | 367 | GCG |
| 269 | 1032 | 1046 | CGG |
| 279 | 899 | 919 | CGG |
| 297 | 706 | 720 | GGC |
| 303 | 633 | 647 | CAC |
| 305 | 1086 | 1100 | CGG |
| 309 | 523 | 537 | GGT |
| 313 | 36 | 53 | AGG |
| 317 | 527 | 553 | CCG |
| 327 | 1085 | 1108 | GCG |
| 329 | 3226 | 3240 | GCA |

[0607] TABLE 4
Swiss-Prot Data

Seq ID: 1
Accession: Q9FZ27
Swissprot_id: GL22_ARATH
Gi_number: 18202917
Description: Germin-like protein subfamily 2
member 2 precursor
Seq ID: 3
Accession: P27164
Swissprot_id: CAL3_PETHY
Gi_number: 115492
Description: CALMODULIN-RELATED PROTEIN
Seq ID: 7
Accession: P56578
Swissprot_id: MLF3_MALFU
Gi_number: 3914387
Description: Allergen Mal f 3 (MF2)
Seq ID: 9
Accession: Q41001
Swissprot_id: BCP_PEA
Gi_number: 2493318
Description: Blue copper protein precursor
Seq ID: 11
Accession: P42736
Swissprot_id: CDI3_ARATH
Gi_number: 1168862
Description: CADMIUM-INDUCED PROTEIN AS30
Seq ID: 13
Accession: P04839
Swissprot_id: C24B_HUMAN
Gi_number: 115211
Description: Cytochrome B-245 heavy chain (P22
phagocyte B-cytochrome) (Neutrophil cytochrome B,
91 kDa polypeptide) (CGD91-PHOX) (GP91-PHOX)
(Heme binding membrane glycoprotein GP91PHOX)
(Cytochrome B(558) beta chain) (Superoxide-
generating NADPH oxidase heavy cha>
Seq ID: 15
Accession: P37835
Swissprot_id: PER2_ORYSA
Gi_number: 585662
Description: Peroxidase precursor
Seq ID: 17
Accession: P80679
Swissprot_id: PERX_ARMRU
Gi_number: 1730490
Description: Peroxidase
Seq ID: 19
Accession: P13983
Swissprot_id: EXTN_TOBAC
Gi_number: 119714
Description: Extensin precursor (Cell wall
hydroxyproline-rich glycoprotein)
Seq ID: 21
Accession: P42736
Swissprot_id: CDI3_ARATH
Gi_number: 1168862
Description: CADMIUM-INDUCED PROTEIN AS30
Seq ID: 23
Accession: Q05968
Swissprot_id: PR1_HORVU
Gi_number: 548592
Description: PATHOGENESIS-RELATED PROTEIN
1 PRECURSOR
Seq ID: 25
Accession: P14009
Swissprot_id: 14KD_DAUCA
Gi_number: 112697
Description: 14 KD PROLINE-RICH PROTEIN
DC2.15 PRECURSOR
Seq ID: 27
Accession: P31691
Swissprot_id: ADT_ORYSA
Gi_number: 399015
Description: ADP,ATP carrier protein,
mitochondrial precursor (ADP/ATP
translocase) (Adenine nucleotide
translocator) (ANT)
Seq ID: 29
Accession: P28968
Swissprot_id: VGLX_HSVEB
Gi_number: 138350
Description: GLYCOPROTEIN X PRECURSOR
Seq ID: 31
Accession: Q43257
Swissprot_id: C7C4_MAIZE
Gi_number: 5921189
Description: CYTOCHROME P450 71C4
Seq ID: 33
Accession: P27061
Swissprot_id: PPA1_LYCES
Gi_number: 130718
Description: Acid phosphatase precursor 1
Seq ID: 35
Accession: P41153
Swissprot_id: HSF8_LYCPE
Gi_number: 729775
Description: HEAT SHOCK FACTOR PROTEIN
HSF8 (HEAT SHOCK TRANSCRIPTION FACTOR 8)
(HSTF 8) (HEAT STRESS TRANSCRIPTION FACTOR)
Seq ID: 37
Accession: Q02438
Swissprot_id: E13E_HORVU
Gi_number: 1352328
Description: GLUCAN ENDO-1,3-BETA-
GLUCOSIDASE GV ((1->3)-BETA-GLUCAN
ENDOHYDROLASE GV) ((1->3)-BETA-GLUCANASE
ISOENZYME GV) (BETA-1,3-ENDOGLUCANASE GV)
Seq ID: 39
Accession: P43293
Swissprot_id: NAK_ARATH
Gi_number: 1171642
Description: Probable serine/threonine-
protein kinase NAK
Seq ID: 41
Accession: P33679
Swissprot_id: ZEAM_MAIZE
Gi_number: 1731426
Description: Zeamatin precursor
Seq ID: 43
Accession: P43216
Swissprot_id: MPH1_HOLLA
Gi_number: 1171005
Description: MAJOR POLLEN ALLERGEN HOL
L 1 PRECURSOR (HOL L I) (HOL L 1.0101
AND 1.0102)
Seq ID: 45
Accession: Q42429
Swissprot_id: AGL8_SOLTU
Gi_number: 3913001
Description: Agamous-like MADS box protein
AGL8 homolog (POTM1-1)
Seq ID: 47
Accession: P21997
Swissprot_id: SSGP_VOLCA
Gi_number: 134920
Description: SULFATED SURFACE GLYCOPROTEIN
185 (SSG 185)
Seq ID: 49
Accession: Q00451
Swissprot_id: PRF1_LYCES
Gi_number: 1709767
Description: 36.4 KD PROLINE-RICH PROTEIN
Seq ID: 51
Accession: P23586
Swissprot_id: STP1_ARATH
Gi_number: 134976
Description: GLUCOSE TRANSPORTER (SUGAR CARRIER)
Seq ID: 53
Accession: Q40412
Swissprot_id: ABA2_NICPL
Gi_number: 5902707
Description: Zeaxanthin epoxidase, chloroplast
precursor
Seq ID: 55
Accession: P51074
Swissprot_id: ANX4_FRAAN
Gi_number: 1703318
Description: Annexin-like protein RJ4
Seq ID: 57
Accession: P47179
Swissprot_id: DAN4_YEAST
Gi_number: 1352944
Description: Cell wall protein DAN4 precursor
Seq ID: 59
Accession: P80679
Swissprot_id: PERX_ARMRU
Gi_number: 1730490
Description: Peroxidase
Seq ID: 61
Accession: P37835
Swissprot_id: PER2_ORYSA
Gi_number: 585662
Description: Peroxidase precursor
Seq ID: 63
Accession: P08640
Swissprot_id: AMYH_YEAST
Gi_number: 728850
Description: GLUCOAMYLASE S1/S2 PRECURSOR
(GLUCAN 1,4-ALPHA-GLUCOSIDASE) (1,4-ALPHA-
D-GLUCAN GLUCOHYDROLASE)
Seq ID: 65
Accession: Q05049
Swissprot_id: MUC1_XENLA
Gi_number: 585527
Description: INTEGUMENTARY MUCIN C.1 (FIM-C.1)
Seq ID: 67
Accession: P24626
Swissprot_id: CHI1_ORYSA
Gi_number: 116303
Description: BASIC ENDOCHITINASE 1 PRECURSOR
Seq ID: 69
Accession: P35694
Swissprot_id: BRU1_SOYBN
Gi_number: 543905
Description: BRASSINOSTEROID-REGULATED PROTEIN
BRU1
Seq ID: 71
Accession: P29022
Swissprot_id: CHIA_MAIZE
Gi_number: 116329
Description: ENDOCHITINASE A PRECURSOR (SEED
CHITINASE A)
Seq ID: 73
Accession: P52914
Swissprot_id: NTPA_PEA
Gi_number: 1709358
Description: Nucleoside-triphosphatase
(Nucleoside triphosphate phosphohydrolase)
(NTPase) (Apyrase)
Seq ID: 75
Accession: Q9SW70
Swissprot_id: SRP_VITRI
Gi_number: 15214303
Description: Stress-related protein
Seq ID: 77
Accession: P28968
Swissprot_id: VGLX_HSVEB
Gi_number: 138350
Description: GLYCOPROTEIN X PRECURSOR
Seq ID: 79
Accession: P27644
Swissprot_id: PGLR_AGRTU
Gi_number: 129937
Description: POLYGALACTURONASE (PECTINASE) (PGL)
Seq ID: 81
Accession: P40387
Swissprot_id: TPS1_SCHPO
Gi_number: 730984
Description: ALPHA,ALPHA-TREHALOSE-PHOSPHATE
SYNTHASE [UDP-FORMING] (TREHALOSE-6-PHOSPHATE
SYNTHASE) (UDP-GLUCOSE-GLUCOSEPHOSPHATE
GLUCOSYLTRANSFERASE)
Seq ID: 83
Accession: P33126
Swissprot_id: HS82_ORYSA
Gi_number: 417154
Description: HEAT SHOCK PROTEIN 82
Seq ID: 85
Accession: P35792
Swissprot_id: PR12_HORVU
Gi_number: 548588
Description: PATHOGENESIS-RELATED PROTEIN
PRB1-2 PRECURSOR
Seq ID: 87
Accession: O04985
Swissprot_id: HBL2_ORYSA
Gi_number: 17432965
Description: Non-symbiotic hemoglobin 2 (Hb2)
Seq ID: 89
Accession: P24632
Swissprot_id: HS22_MAIZE
Gi_number: 123553
Description: 17.8 KD CLASS II HEAT SHOCK PROTEIN
Seq ID: 91
Accession: P23444
Swissprot_id: H1_MAIZE
Gi_number: 121950
Description: HISTONE H1
Seq ID: 93
Accession: P51103
Swissprot_id: DFRA_CALCH
Gi_number: 1706369
Description: DIHYDROFLAVONOL-4-REDUCTASE (DFR)
(DIHYDROKAEMPFEROL 4-REDUCTASE)
Seq ID: 95
Accession: P51847
Swissprot_id: DCP1_ORYSA
Gi_number: 1706325
Description: PYRUVATE DECARBOXYLASE ISOZYME 1
(PDC)
Seq ID: 97
Accession: P22953
Swissprot_id: HS71_ARATH
Gi_number: 12643273
Description: Heat shock cognate 70 kDa protein
1 (Hsc70.1)
Seq ID: 99
Accession: Q9WTV7
Swissprot_id: RNFB_MOUSE
Gi_number: 13124535
Description: RING FINGER PROTEIN 12 (LIM
DOMAIN INTERACTING RING FINGER PROTEIN) (RING
FINGER LIM DOMAIN-BINDING PROTEIN) (R-LIM)
Seq ID: 101
Accession: P93147
Swissprot_id: C81E_GLYEC
Gi_number: 5915842
Description: CYTOCHROME P450 81E1 (ISOFLAVONE
2′-HYDROXYLASE) (P450 91A4) (CYP GE-3)
Seq ID: 103
Accession: P24805
Swissprot_id: TSJT_TOBAC
Gi_number: 136452
Description: STEM-SPECIFIC PROTEIN TSJT1
Seq ID: 105
Accession: P12257
Swissprot_id: GUB2_HORVU
Gi_number: 121773
Description: LICHENASE II PRECURSOR (ENDO-
BETA-1,3-1,4 GLUCANASE II) ((1->3,1->4)-BETA-
GLUCANASE ISOENZYME EII)
Seq ID: 107
Accession: P25776
Swissprot_id: ORYA_ORYSA
Gi_number: 129231
Description: ORYZAIN ALPHA CHAIN PRECURSOR
Seq ID: 109
Accession: P33679
Swissprot_id: ZEAM_MAIZE
Gi_number: 1731426
Description: Zeamatin precursor
Seq ID: 111
Accession: P12653
Swissprot_id: GTH1_MAIZE
Gi_number: 121695
Description: GLUTATHIONE S-TRANSFERASE I
(GST-I) (GST-29) (GST CLASS-PHI)
Seq ID: 113
Accession: P52839
Swissprot_id: FSTL_ARATH
Gi_number: 1706917
Description: Flavonol sulfotransferase-like
(RaRO47)
Seq ID: 115
Accession: P38564
Swissprot_id: MNBA_MAIZE
Gi_number: 1346559
Description: DNA-BINDING PROTEIN MNB1A
Seq ID: 117
Accession: P11675
Swissprot_id: IE18_PRVIF
Gi_number: 124178
Description: IMMEDIATE-EARLY
PROTEIN IE180
Seq ID: 119
Accession: P31541
Swissprot_id: CLAA_LYCES
Gi_number: 399212
Description: ATP-dependent clp protease
ATP-binding subunit clpA homolog CD4A,
chloroplast precursor
Seq ID: 121
Accession: P52157
Swissprot_id: RHO_STRLI
Gi_number: 1710269
Description: TRANSCRIPTION TERMINATION
FACTOR RHO
Seq ID: 123
Accession: P13730
Swissprot_id: SGS3_DROER
Gi_number: 134466
Description: SALIVARY GLUE PROTEIN SGS-3
PRECURSOR
Seq ID: 125
Accession: O48670
Swissprot_id: RERA_ARATH
Gi_number: 6225938
Description: RER1A protein (AtRER1A)
Seq ID: 127
Accession: P50165
Swissprot_id: TRNH_DATST
Gi_number: 1717755
Description: TROPINONE REDUCTASE HOMOLOG (P29X)
Seq ID: 129
Accession: P12978
Swissprot_id: EBN2_EBV
Gi_number: 119111
Description: EBNA-2 NUCLEAR PROTEIN
Seq ID: 131
Accession: P43293
Swissprot_id: NAK_ARATH
Gi_number: 1171642
Description: Probable serine/threonine-protein
kinase NAK
Seq ID: 133
Accession: P52594
Swissprot_id: NUPL_HUMAN
Gi_number: 1709416
Description: NUCLEOPORIN-LIKE PROTEIN RIP
(HIV-1 REV-BINDING PROTEIN) (REV INTERACTING
PROTEIN) (REV/REX ACTIVATION DOMAIN-BINDING
PROTEIN)
Seq ID: 135
Accession: Q41819
Swissprot_id: IAAG_MAIZE
Gi_number: 2501499
Description: INDOLE-3-ACETATE BETA-
GLUCOSYLTRANSFERASE (IAA-GLU SYNTHETASE)
((URIDINE 5′-DIPHOSPHATE-GLUCOSE:INDOL-
3-YLACETYL)-BETA-D-GLUCOSYL TRANSFERASE)
Seq ID: 137
Accession: P14009
Swissprot_id: 14KD_DAUCA
Gi_number: 112697
Description: 14 KD PROLINE-RICH PROTEIN
DC2.15 PRECURSOR
Seq ID: 139
Accession: P42736
Swissprot_id: CDI3_ARATH
Gi_number: 1168862
Description: CADMIUM-INDUCED PROTEIN AS30
Seq ID: 143
Accession: Q99962
Swissprot_id: SH32_HUMAN
Gi_number: 10720276
Description: SH3-containing GRB2-like protein
2 (SH3 domain protein 2A) (Endophilin 1)
(EEN-B1)
Seq ID: 145
Accession: Q9FG65
Swissprot_id: C911_ARATH
Gi_number: 13878373
Description: CYTOCHROME P450 91A1
Seq ID: 147
Accession: P93329
Swissprot_id: NO20_MEDTR
Gi_number: 3914142
Description: EARLY NODULIN 20 PRECURSOR (N-20)
Seq ID: 149
Accession: P51103
Swissprot_id: DFRA_CALCH
Gi_number: 1706369
Description: DIHYDROFLAVONOL-4-REDUCTASE (DFR)
(DIHYDROKAEMPFEROL 4-REDUCTASE)
Seq ID: 157
Accession: P52594
Swissprot_id: NUPL_HUMAN
Gi_number: 1709416
Description: NUCLEOPORIN-LIKE PROTEIN RIP
(HIV-1 REV-BINDING PROTEIN) (REV INTERACTING
PROTEIN) (REV/REX ACTIVATION DOMAIN-BINDING
PROTEIN)
Seq ID: 159
Accession: Q00451
Swissprot_id: PRF1_LYCES
Gi_number: 1709767
Description: 36.4 KD PROLINE-RICH PROTEIN
Seq ID: 161
Accession: Q38836
Swissprot_id: AG11_ARATH
Gi_number: 12229648
Description: Agamous-like MADS box protein AGL11
Seq ID: 165
Accession: O04985
Swissprot_id: HBL2_ORYSA
Gi_number: 17432965
Description: Non-symbiotic hemoglobin 2 (Hb2)
Seq ID: 167
Accession: P80679
Swissprot_id: PERX_ARMRU
Gi_number: 1730490
Description: Peroxidase
Seq ID: 169
Accession: Q9Y2L1
Swissprot_id: RR44_HUMAN
Gi_number: 7674415
Description: EXOSOME COMPLEX EXONUCLEASE
RRP44 (RIBOSOMAL RNA PROCESSING PROTEIN 44)
(DIS3 PROTEIN HOMOLOG)
Seq ID: 171
Accession: P27061
Swissprot_id: PPA1_LYCES
Gi_number: 130718
Description: Acid phosphatase precursor 1
Seq ID: 173
Accession: P35792
Swissprot_id: PR12_HORVU
Gi_number: 548588
Description: PATHOGENESIS-RELATED PROTEIN
PRB1-2 PRECURSOR
Seq ID: 175
Accession: O04682
Swissprot_id: PTI6_LYCES
Gi_number: 7531181
Description: PATHOGENESIS-RELATED GENES
TRANSCRIPTIONAL ACTIVATOR PTI6
Seq ID: 177
Accession: Q05968
Swissprot_id: PR1_HORVU
Gi_number: 548592
Description: PATHOGENESIS-RELATED PROTEIN
1 PRECURSOR
Seq ID: 179
Accession: P43254
Swissprot_id: COP1_ARATH
Gi_number: 1169012
Description: COP1 regulatory protein (FUSCA
protein FUS1)
Seq ID: 181
Accession: O48958
Swissprot_id: C7E1_SORBI
Gi_number: 5915841
Description: Cytochrome P450 71E1
Seq ID: 183
Accession: P14080
Swissprot_id: PAP2_CARPA
Gi_number: 2507252
Description: CHYMOPAPAIN PRECURSOR (PAPAYA
PROTEINASE II) (PPII)
Seq ID: 185
Accession: P24102
Swissprot_id: PERE_ARATH
Gi_number: 129817
Description: Basic peroxidase E precursor
Seq ID: 187
Accession: P11675
Swissprot_id: IE18_PRVIF
Gi_number: 124178
Description: IMMEDIATE-EARLY PROTEIN IE180
Seq ID: 189
Accession: Q96324
Swissprot_id: GTH7_ARATH
Gi_number: 12230147
Description: Glutathione S-transferase (GST
class phi)
Seq ID: 191
Accession: P31691
Swissprot_id: ADT_ORYSA
Gi_number: 399015
Description: ADP,ATP carrier protein,
mitochondrial precursor (ADP/ATP
translocase) (Adenine nucleotide
translocator) (ANT)
Seq ID: 193
Accession: P50165
Swissprot_id: TRNH_DATST
Gi_number: 1717755
Description: TROPINONE REDUCTASE HOMOLOG (P29X)
Seq ID: 197
Accession: P41152
Swissprot_id: HSF3_LYCPE
Gi_number: 729774
Description: HEAT SHOCK FACTOR PROTEIN HSF30
(HEAT SHOCK TRANSCRIPTION FACTOR 30) (HSTF
30) (HEAT STRESS TRANSCRIPTION FACTOR)
Seq ID: 199
Accession: P13730
Swissprot_id: SGS3_DROER
Gi_number: 134466
Description: SALIVARY GLUE PROTEIN SGS-3
PRECURSOR
Seq ID: 201
Accession: Q41819
Swissprot_id: IAAG_MAIZE
Gi_number: 2501499
Description: INDOLE-3-ACETATE BETA-
GLUCOSYLTRANSFERASE (IAA-GLU SYNTHETASE) ((URIDINE
5′-DIPHOSPHATE-GLUCOSE:INDOL-3-YLACETYL)-
BETA-D-GLUCOSYL TRANSFERASE)
Seq ID: 203
Accession: P35793
Swissprot_id: PR13_HORVU
Gi_number: 548589
Description: PATHOGENESIS-RELATED PROTEIN PRB1-3
PRECURSOR (PR-1B) (HV-8)
Seq ID: 205
Accession: P56578
Swissprot_id: MLF3_MALFU
Gi_number: 3914387
Description: Allergen Mal f 3 (MF2)
Seq ID: 207
Accession: P35694
Swissprot_id: BRU1_SOYBN
Gi_number: 543905
Description: BRASSINOSTEROID-REGULATED
PROTEIN BRU1
Seq ID: 209
Accession: Q43793
Swissprot_id: G6PC_TOBAC
Gi_number: 3023817
Description: GLUCOSE-6-PHOSPHATE 1-
DEHYDROGENASE, CHLOROPLAST PRECURSOR (G6PD)
Seq ID: 211
Accession: P29022
Swissprot_id: CHIA_MAIZE
Gi_number: 116329
Description: ENDOCHITINASE A PRECURSOR
(SEED CHITINASE A)
Seq ID: 213
Accession: P27322
Swissprot_id: HS72_LYCES
Gi_number: 123620
Description: HEAT SHOCK COGNATE 70 KD PROTEIN 2
Seq ID: 215
Accession: P38564
Swissprot_id: MNBA_MAIZE
Gi_number: 1346559
Description: DNA-BINDING PROTEIN MNB1A
Seq ID: 217
Accession: P11675
Swissprot_id: IE18_PRVIF
Gi_number: 124178
Description: IMMEDIATE-EARLY PROTEIN IE180
Seq ID: 219
Accession: Q9SW70
Swissprot_id: SRP_VITRI
Gi_number: 15214303
Description: Stress-related protein
Seq ID: 221
Accession: P15737
Swissprot_id: E13B_HORVU
Gi_number: 119003
Description: Glucan endo-1,3-beta-glucosidase
GII precursor ((1->3)-beta-glucan endohydrolase
GII) ((1->3)-beta-glucanase isoenzyme GII)
(Beta-1,3-endoglucanase GII)
Seq ID: 223
Accession: P51846
Swissprot_id: DCP2_TOBAC
Gi_number: 1706330
Description: PYRUVATE DECARBOXYLASE ISOZYME 2
(PDC)
Seq ID: 225
Accession: P11955
Swissprot_id: CHI1_HORVU
Gi_number: 2506281
Description: 26 KD ENDOCHITINASE 1 PRECURSOR
Seq ID: 227
Accession: P21997
Swissprot_id: SSGP_VOLCA
Gi_number: 134920
Description: SULFATED SURFACE GLYCOPROTEIN 185
(SSG 185)
Seq ID: 229
Accession: P33679
Swissprot_id: ZEAM_MAIZE
Gi_number: 1731426
Description: Zeamatin precursor
Seq ID: 231
Accession: P27061
Swissprot_id: PPA1_LYCES
Gi_number: 130718
Description: Acid phosphatase precursor 1
Seq ID: 233
Accession: P54781
Swissprot_id: ERG5_YEAST
Gi_number: 1706693
Description: CYTOCHROME P450 61 (C-22 STEROL
DESATURASE)
Seq ID: 235
Accession: Q9SFF9
Swissprot_id: GL17_ARATH
Gi_number: 18203443
Description: Germin-like protein subfamily 1
member 7 precursor
Seq ID: 237
Accession: P11955
Swissprot_id: CHI1_HORVU
Gi_number: 2506281
Description: 26 KD ENDOCHITINASE 1 PRECURSOR
Seq ID: 239
Accession: O04886
Swissprot_id: PME1_CITSI
Gi_number: 6174912
Description: PECTINESTERASE 1.1 PRECURSOR (PECTIN
METHYLESTERASE) (PE)
Seq ID: 243
Accession: P11369
Swissprot_id: POL2_MOUSE
Gi_number: 130402
Description: Retrovirus-related POL polyprotein
[Contains: Reverse transcriptase ; Endonuclease]
Seq ID: 245
Accession: P31688
Swissprot_id: TPS2_YEAST
Gi_number: 1730010
Description: TREHALOSE-PHOSPHATASE (TREHALOSE 6-
PHOSPHATE PHOSPHATASE) (TPP)
Seq ID: 247
Accession: P23586
Swissprot_id: STP1_ARATH
Gi_number: 134976
Description: GLUCOSE TRANSPORTER (SUGAR CARRIER)
Seq ID: 249
Accession: P29375
Swissprot_id: RBB2_HUMAN
Gi_number: 1710032
Description: Retinoblastoma-binding protein 2
(RBBP-2)
Seq ID: 251
Accession: P27164
Swissprot_id: CAL3_PETHY
Gi_number: 115492
Description: CALMODULIN-RELATED PROTEIN
Seq ID: 253
Accession: P74361
Swissprot_id: CLPB_SYNY3
Gi_number: 2493734
Description: ClpB protein
Seq ID: 257
Accession: P14009
Swissprot_id: 14KD_DAUCA
Gi_number: 112697
Description: 14 KD PROLINE-RICH PROTEIN DC2.15
PRECURSOR
Seq ID: 259
Accession: O46522
Swissprot_id: C24B_BOVIN
Gi_number: 6685239
Description: CYTOCHROME B-245 HEAVY CHAIN (P22
PHAGOCYTE B-CYTOCHROME) (NEUTROPHIL
CYTOCHROME B, 91 KDA POLYPEPTIDE) (CGD91-PHOX)
(GP91-PHOX)(HEME BINDING MEMBRANE GLYCOPROTEIN
GP91PHOX) (CYTOCHROME B(558) BETA CHAIN)
(SUPEROXIDE-GENERATING NADPH OXIDASE HEAVY CHA>
Seq ID: 261
Accession: P21997
Swissprot_id: SSGP_VOLCA
Gi_number: 134920
Description: SULFATED SURFACE GLYCOPROTEIN
185 (SSG 185)
Seq ID: 263
Accession: P08640
Swissprot_id: AMYH_YEAST
Gi_number: 728850
Description: GLUCOAMYLASE S1/S2 PRECURSOR
(GLUCAN 1,4-ALPHA-GLUCOSIDASE) (1,4-ALPHA-
D-GLUCAN GLUCOHYDROLASE)
Seq ID: 265
Accession: P33126
Swissprot_id: HS82_ORYSA
Gi_number: 417154
Description: HEAT SHOCK PROTEIN 82
Seq ID: 267
Accession: P27644
Swissprot_id: PGLR_AGRTU
Gi_number: 129937
Description: POLYGALACTURONASE (PECTINASE) (PGL)
Seq ID: 269
Accession: P42736
Swissprot_id: CDI3_ARATH
Gi_number: 1168862
Description: CADMIUM-INDUCED PROTEIN AS30
Seq ID: 271
Accession: P29141
Swissprot_id: SUBV_BACSU
Gi_number: 135023
Description: Minor extracellular protease VPR
precursor
Seq ID: 273
Accession: Q08275
Swissprot_id: HS23_MAIZE
Gi_number: 729762
Description: 17.0 KD CLASS II HEAT SHOCK PROTEIN
(HSP 18)
Seq ID: 275
Accession: O04701
Swissprot_id: MPC1_CYNDA
Gi_number: 14423757
Description: Major pollen allergen Cyn d 1
Seq ID: 277
Accession: P23444
Swissprot_id: H1_MAIZE
Gi_number: 121950
Description: HISTONE H1
Seq ID: 279
Accession: Q9UKN7
Swissprot_id: MY15_HUMAN
Gi_number: 13124361
Description: Myosin XV (Unconventional myosin-15)
Seq ID: 281
Accession: Q43135
Swissprot_id: C791_SORBI
Gi_number: 5915822
Description: Cytochrome P450 79A1 (Cytochrome
P450TYR)
Seq ID: 283
Accession: Q02357
Swissprot_id: ANK1_MOUSE
Gi_number: 1168457
Description: Ankyrin 1 (Erythrocyte ankyrin)
Seq ID: 285
Accession: P52914
Swissprot_id: NTPA_PEA
Gi_number: 1709358
Description: Nucleoside-triphosphatase
(Nucleoside triphosphate phosphohydrolase)
(NTPase) (Apyrase)
Seq ID: 287
Accession: Q40412
Swissprot_id: ABA2_NICPL
Gi_number: 5902707
Description: Zeaxanthin epoxidase, chloroplast
precursor
Seq ID: 289
Accession: P51074
Swissprot_id: ANX4_FRAAN
Gi_number: 1703318
Description: Annexin-like protein RJ4
Seq ID: 291
Accession: P21877
Swissprot_id: BCSA_ACEXY
Gi_number: 584832
Description: Cellulose synthase catalytic
subunit [UDP-forming]
Seq ID: 293
Accession: P24805
Swissprot_id: TSJT_TOBAC
Gi_number: 136452
Description: STEM-SPECIFIC PROTEIN TSJT1
Seq ID: 295
Accession: P18583
Swissprot_id: SON_HUMAN
Gi_number: 586013
Description: SON PROTEIN (SON3)
Seq ID: 297
Accession: P30986
Swissprot_id: RETO_ESCCA
Gi_number: 400972
Description: RETICULINE OXIDASE PRECURSOR
(BERBERINE-BRIDGE-FORMING ENZYME) (BBE)
(TETRAHYDROPROTOBERBERINE SYNTHASE)
Seq ID: 299
Accession: Q9NVW2
Swissprot_id: RNFB_HUMAN
Gi_number: 13124522
Description: RING FINGER PROTEIN 12 (LIM DOMAIN
INTERACTING RING FINGER PROTEIN) (RING FINGER
LIM DOMAIN-BINDING PROTEIN) (R-LIM) (NY-REN-43
ANTIGEN)
Seq ID: 301
Accession: P10978
Swissprot_id: POLX_TOBAC
Gi_number: 130582
Description: Retrovirus-related Pol polyprotein
from transposon TNT 1-94 [Contains: Pro tease;
Reverse transcriptase; Endonuclease]
Seq ID: 303
Accession: P29386
Swissprot_id: AGL6_ARATH
Gi_number: 1351899
Description: Agamous-like MADS box protein AGL6
Seq ID: 305
Accession: Q41819
Swissprot_id: IAAG_MAIZE
Gi_number: 2501499
Description: INDOLE-3-ACETATE BETA-
GLUCOSYLTRANSFERASE (IAA-GLU SYNTHETASE) ((URIDINE
5′-DIPHOSPHATE-GLUCOSE:INDOL-3-YLACETYL)-BETA-D-
GLUCOSYL TRANSFERASE)
Seq ID: 309
Accession: P33479
Swissprot_id: IE18_PRVKA
Gi_number: 462387
Description: IMMEDIATE-EARLY PROTEIN IE180
Seq ID: 311
Accession: P46573
Swissprot_id: APKB_ARATH
Gi_number: 12644274
Description: PROTEIN KINASE APK1B
Seq ID: 313
Accession: P00434
Swissprot_id: PERX_BRARA
Gi_number: 464365
Description: Peroxidase P7
Seq ID: 315
Accession: P28493
Swissprot_id: PR5_ARATH
Gi_number: 135915
Description: Pathogenesis-related protein 5
precursor (PR-5)
Seq ID:317
Accession: P70315
Swissprot_id: WASP_MOUSE
Gi_number: 2499130
Description: Wiskott-Aldrich syndrome protein
homolog (WASP)
Seq ID:319
Accession: P22196
Swissprot_id: PER2_ARAHY
Gi_number: 129808
Description: Cationic peroxidase 2 precursor
Seq ID:321
Accession: Q02438
Swissprot_id: E13E_HORVU
Gi_number: 1352328
Description: GLUCAN ENDO-1,3-BETA-GLUCOSIDASE
GV ((1->3)-BETA-GLUCAN ENDOHYDROLASE GV) ((1-
>3)-BETA-GLUCANASE ISOENZYME GV) (BETA-1,3-
ENDOGLUCANASE GV)
Seq ID: 323
Accession: P13652
Swissprot_id: CDD_ECOLI
Gi_number:416781
Description: Cytidine deaminase (Cytidine
aminohydrolase) (CDA)
Seq ID: 325
Accession: O48670
Swissprot_id: RERA_ARATH
Gi_number: 6225938
Description: RER1A protein (AtRER1A)
Seq ID: 327
Accession: O80340
Swissprot_id: ERF4_ARATH
Gi_number: 7531110
Description: Ethylene responsive element binding
factor 4 (AtERF4)
Seq ID: 329
Accession: Q00764
Swissprot_id: TPS1_YEAST
Gi_number: 401206
Description: ALPHA,ALPHA-TREHALOSE-PHOSPHATE
SYNTHASE [UDP-FORMING] 56 KD SUBUNIT
(TREHALOSE-6-PHOSPHATE SYNTHASE) (UDP-
GLUCOSE-GLUCOSEPHOSPHATE GLUCOSYLTRANSFERASE)
(GENERAL GLUCOSE SENSOR, SUBUNIT 1) (GLYCOGEN
METABOLISM CONTROL PROTEIN GLC6)
Seq ID: 331
Accession: P52839
Swissprot_id: FSTL_ARATH
Gi_number: 1706917
Description: Flavonol sulfotransferase-like
(RaRO47)
Seq ID: 333
Accession: P26792
Swissprot_id: INV1_DAUCA
Gi_number: 124712
Description: BETA-FRUCTOFURANOSIDASE, INSOLUBLE
ISOENZYME 1 PRECURSOR (SUCROSE-6-PHOSPHATE
HYDROLASE 1) (INVERTASE 1) (CELL WALL BETA-
FRUCTOSIDASE 1)
Seq ID: 335
Accession: P10569
Swissprot_id: MYSC_ACACA
Gi_number: 127749
Description: Myosin IC heavy chain
Seq ID:337
Accession: Q9SYQ8
Swissprot_id: CLV1_ARATH
Gi_number: 12643323
Description: RECEPTOR PROTEIN KINASE CLAVATA1
PRECURSOR
Seq ID:339
Accession: P42158
Swissprot_id: KC1D_ARATH
Gi_number: 1170622
Description: CASEIN KINASE I, DELTA ISOFORM
LIKE (CKI-DELTA)

[0608] TABLE 5
The following table illustrates the correlation between
the SEQ ID NOs of U.S. Provisional Application No. 60/368,327,
filed Mar. 27, 2002 and the SEQ ID NOs provided in the
Sequence Listing. (for example, SEQ ID NO: 1 in the Sequence
Listing corresponds to SEQ ID NO: 120535 mentioned in Provisional
Application No. 60/368,327)

| New | Previous |
|---|---|
| 1 | 120535 |
| 2 | 120536 |
| 3 | 120527 |
| 4 | 120528 |
| 5 | 149075 |
| 6 | 149076 |
| 7 | 120617 |
| 8 | 120618 |
| 9 | 149073 |
| 10 | 149074 |
| 11 | 120297 |
| 12 | 120298 |
| 13 | 121307 |
| 14 | 121308 |
| 15 | 121333 |
| 16 | 121334 |
| 17 | 121171 |
| 18 | 121172 |
| 19 | 121239 |
| 20 | 121240 |
| 21 | 121231 |
| 22 | 121232 |
| 23 | 125709 |
| 24 | 125710 |
| 25 | 120937 |
| 26 | 120938 |
| 27 | 121081 |
| 28 | 121082 |
| 29 | 120769 |
| 30 | 120770 |
| 31 | 120859 |
| 32 | 120860 |
| 33 | 149077 |
| 34 | 149078 |
| 35 | 121489 |
| 36 | 121490 |
| 37 | 121569 |
| 38 | 121570 |
| 39 | 123933 |
| 40 | 123934 |
| 41 | 124021 |
| 42 | 124022 |
| 43 | 149087 |
| 44 | 149088 |
| 45 | 125643 |
| 46 | 125644 |
| 47 | 149085 |
| 48 | 149086 |
| 49 | 123549 |
| 50 | 123550 |
| 51 | 123699 |
| 52 | 123700 |
| 53 | 123669 |
| 54 | 123670 |
| 55 | 123275 |
| 56 | 123276 |
| 57 | 123361 |
| 58 | 123362 |
| 59 | 123373 |
| 60 | 123374 |
| 61 | 123261 |
| 62 | 123262 |
| 63 | 123435 |
| 64 | 123436 |
| 65 | 125635 |
| 66 | 125636 |
| 67 | 123403 |
| 68 | 123404 |
| 69 | 123387 |
| 70 | 123388 |
| 71 | 149089 |
| 72 | 149090 |
| 73 | 124257 |
| 74 | 124258 |
| 75 | 124235 |
| 76 | 124236 |
| 77 | 124961 |
| 78 | 124962 |
| 79 | 124947 |
| 80 | 124948 |
| 81 | 124929 |
| 82 | 124930 |
| 83 | 124921 |
| 84 | 124922 |
| 85 | 125089 |
| 86 | 125090 |
| 87 | 125075 |
| 88 | 125076 |
| 89 | 125053 |
| 90 | 125054 |
| 91 | 125133 |
| 92 | 125134 |
| 93 | 125121 |
| 94 | 125122 |
| 95 | 125535 |
| 96 | 125536 |
| 97 | 124687 |
| 98 | 124688 |
| 99 | 124811 |
| 100 | 124812 |
| 101 | 124849 |
| 102 | 124850 |
| 103 | 149091 |
| 104 | 149092 |
| 105 | 124489 |
| 106 | 124490 |
| 107 | 124529 |
| 108 | 124530 |
| 109 | 125477 |
| 110 | 125478 |
| 111 | 125381 |
| 112 | 125382 |
| 113 | 125203 |
| 114 | 125204 |
| 115 | 122605 |
| 116 | 122606 |
| 117 | 122911 |
| 118 | 122912 |
| 119 | 149079 |
| 120 | 149080 |
| 121 | 122771 |
| 122 | 122772 |
| 123 | 122527 |
| 124 | 122528 |
| 125 | 149083 |
| 126 | 149084 |
| 127 | 123157 |
| 128 | 123158 |
| 129 | 121699 |
| 130 | 121700 |
| 131 | 122215 |
| 132 | 122216 |
| 133 | 122847 |
| 134 | 122848 |
| 135 | 121929 |
| 136 | 121930 |
| 137 | 149081 |
| 138 | 149082 |
| 139 | 121749 |
| 140 | 121750 |
| 141 | 122161 |
| 142 | 122162 |
| 143 | 121997 |
| 144 | 121998 |
| 145 | 149001 |
| 146 | 149002 |
| 147 | 149003 |
| 148 | 149004 |
| 149 | 5893 |
| 150 | 5894 |
| 151 | 6991 |
| 152 | 6992 |
| 153 | 7619 |
| 154 | 7620 |
| 155 | 10213 |
| 156 | 10214 |
| 157 | 14223 |
| 158 | 14224 |
| 159 | 149005 |
| 160 | 149006 |
| 161 | 17655 |
| 162 | 17656 |
| 163 | 18629 |
| 164 | 18630 |
| 165 | 22941 |
| 166 | 22942 |
| 167 | 22945 |
| 168 | 22946 |
| 169 | 25033 |
| 170 | 25034 |
| 171 | 27301 |
| 172 | 27302 |
| 173 | 27689 |
| 174 | 27690 |
| 175 | 27725 |
| 176 | 27726 |
| 177 | 28059 |
| 178 | 28060 |
| 179 | 149051 |
| 180 | 149052 |
| 181 | 149007 |
| 182 | 149008 |
| 183 | 29425 |
| 184 | 29426 |
| 185 | 30813 |
| 186 | 30814 |
| 187 | 31907 |
| 188 | 31908 |
| 189 | 32423 |
| 190 | 32424 |
| 191 | 33249 |
| 192 | 33250 |
| 193 | 149009 |
| 194 | 149010 |
| 195 | 149053 |
| 196 | 149054 |
| 197 | 149055 |
| 198 | 149056 |
| 199 | 149011 |
| 200 | 149012 |
| 201 | 149013 |
| 202 | 149014 |
| 203 | 149015 |
| 204 | 149016 |
| 205 | 38911 |
| 206 | 38912 |
| 207 | 41457 |
| 208 | 41458 |
| 209 | 41905 |
| 210 | 41906 |
| 211 | 149017 |
| 212 | 149018 |
| 213 | 44427 |
| 214 | 44428 |
| 215 | 149019 |
| 216 | 149020 |
| 217 | 149057 |
| 218 | 149058 |
| 219 | 47197 |
| 220 | 47198 |
| 221 | 47475 |
| 222 | 47476 |
| 223 | 47585 |
| 224 | 47586 |
| 225 | 149021 |
| 226 | 149022 |
| 227 | 50851 |
| 228 | 50852 |
| 229 | 149023 |
| 230 | 149024 |
| 231 | 149025 |
| 232 | 149026 |
| 233 | 52307 |
| 234 | 52308 |
| 235 | 53513 |
| 236 | 53514 |
| 237 | 53973 |
| 238 | 53974 |
| 239 | 56253 |
| 240 | 56254 |
| 241 | 149059 |
| 242 | 149060 |
| 243 | 149061 |
| 244 | 149062 |
| 245 | 58923 |
| 246 | 58924 |
| 247 | 59651 |
| 248 | 59652 |
| 249 | 149027 |
| 250 | 149028 |
| 251 | 61707 |
| 252 | 61708 |
| 253 | 62633 |
| 254 | 62634 |
| 255 | 149063 |
| 256 | 149064 |
| 257 | 149029 |
| 258 | 149030 |
| 259 | 68781 |
| 260 | 68782 |
| 261 | 70307 |
| 262 | 70308 |
| 263 | 149031 |
| 264 | 149032 |
| 265 | 74071 |
| 266 | 74072 |
| 267 | 74767 |
| 268 | 74768 |
| 269 | 76351 |
| 270 | 76352 |
| 271 | 77599 |
| 272 | 77600 |
| 273 | 149033 |
| 274 | 149034 |
| 275 | 78959 |
| 276 | 78960 |
| 277 | 80875 |
| 278 | 80876 |
| 279 | 149035 |
| 280 | 149036 |
| 281 | 83163 |
| 282 | 83164 |
| 283 | 149065 |
| 284 | 149066 |
| 285 | 149037 |
| 286 | 149038 |
| 287 | 85455 |
| 288 | 85456 |
| 289 | 149067 |
| 290 | 149068 |
| 291 | 149039 |
| 292 | 149040 |
| 293 | 90315 |
| 294 | 90316 |
| 295 | 90359 |
| 296 | 90360 |
| 297 | 149041 |
| 298 | 149042 |
| 299 | 95133 |
| 300 | 95134 |
| 301 | 149069 |
| 302 | 149070 |
| 303 | 95635 |
| 304 | 95636 |
| 305 | 149071 |
| 306 | 149072 |
| 307 | 97077 |
| 308 | 97078 |
| 309 | 98203 |
| 310 | 98204 |
| 311 | 98309 |
| 312 | 98310 |
| 313 | 149043 |
| 314 | 149044 |
| 315 | 99619 |
| 316 | 99620 |
| 317 | 149045 |
| 318 | 149046 |
| 319 | 100527 |
| 320 | 100528 |
| 321 | 149047 |
| 322 | 149048 |
| 323 | 101447 |
| 324 | 101448 |
| 325 | 101953 |
| 326 | 101954 |
| 327 | 102459 |
| 328 | 102460 |
| 329 | 108545 |
| 330 | 108546 |
| 331 | 149049 |
| 332 | 149050 |
| 333 | 109193 |
| 334 | 109194 |
| 335 | 109503 |
| 336 | 109504 |
| 337 | 110137 |
| 338 | 110138 |
| 339 | 110281 |
| 340 | 110282 |
| 341 | 110823 |
| 342 | 110824 |

[0609] TABLE 6
this table provides SEQ ID NOs of banana, wheat, rice
and maize representing cDNA/EST sequences that are homologous
to the rice sequences show in column 1.

| Rice | Banan | Wheat | Rice | Maize |
|---|---|---|---|---|
| (SEQ ID) | (SEQ ID) | (SEQ ID) | (SEQ ID) | (SEQ ID) |
| 1 | 535 | 658 | 355 | 756 |
| 3 | 534 | 594 | 357 | 688 |
| 5 | 508 | 566 | 447 | 709 |
| 7 | 474 | 626 | 449 | 758 |
| 9 | — | 569 | 343 | 757 |
| 11 | 518 | 587 | | 702 |
| 15 | — | 604 | 359 | 704 |
| 17 | — | 608 | 369 | 694 |
| 19 | — | 650 | 381 | 711 |
| 21 | 518 | 589 | 361 | 683 |
| 23 | 530 | 600 | 445 | 765 |
| 25 | 521 | 646 | 363 | 712 |
| 27 | 527 | — | 373 | 733 |
| 29 | 495 | 554 | 379 | 684 |
| 31 | 484 | 659 | 375 | — |
| 33 | — | 641 | 383 | 737 |
| 35 | — | 597 | | 715 |
| 37 | 531 | 639 | 377 | 736 |
| 39 | 488 | 655 | 367 | 752 |
| 41 | 532 | 571 | 389 | 682 |
| 43 | — | 614 | 391 | 776 |
| 45 | 538 | 651 | 415 | 713 |
| 47 | 491 | 584 | 397 | 698 |
| 49 | 504 | 636 | 399 | 729 |
| 51 | 492 | 673 | 405 | 734 |
| 53 | 525 | 669 | 393 | 779 |
| 55 | — | 644 | 401 | — |
| 57 | 501 | 672 | 407 | 728 |
| 59 | 515 | 592 | 395 | 747 |
| 61 | — | 617 | 403 | 747 |
| 63 | 513 | 649 | | 742 |
| 65 | — | 638 | 385 | 725 |
| 67 | 511 | 595 | 413 | 720 |
| 69 | 505 | 593 | 411 | 741 |
| 71 | 502 | 620 | 409 | 762 |
| 73 | — | 567 | | — |
| 75 | 510 | 666 | 429 | 773 |
| 77 | 517 | 579 | 423 | 771 |
| 79 | 480 | 624 | 419 | 755 |
| 81 | — | — | 417 | 692 |
| 83 | 489 | 631 | 387 | 746 |
| 85 | 530 | 627 | 345 | 774 |
| 87 | — | 633 | 435 | — |
| 89 | 523 | 613 | 347 | 726 |
| 91 | 536 | 596 | 371 | 691 |
| 93 | 528 | 642 | | 735 |
| 95 | 533 | 602 | 351 | 750 |
| 97 | 529 | 607 | 425 | 732 |
| 99 | — | 640 | 431 | 677 |
| 101 | 490 | 565 | 433 | 743 |
| 103 | 485 | 622 | 437 | 778 |
| 105 | 531 | 612 | 439 | 731 |
| 107 | 497 | 581 | 441 | 723 |
| 109 | 532 | 571 | 353 | 682 |
| 111 | 524 | 603 | 427 | 745 |
| 113 | — | 560 | 443 | 697 |
| 115 | — | 599 | | 753 |
| 117 | 512 | 611 | 451 | 695 |
| 121 | 514 | 635 | 453 | 760 |
| 123 | — | 577 | 455 | 777 |
| 125 | 493 | 670 | 457 | 710 |
| 127 | — | 543 | 459 | 699 |
| 129 | 481 | 632 | 461 | 748 |
| 131 | — | 545 | | 763 |
| 133 | — | 578 | 463 | — |
| 135 | — | 668 | | — |
| 137 | 521 | 606 | 465 | 693 |
| 139 | 503 | 588 | 467 | 708 |
| 141 | 487 | 648 | 469 | — |
| 143 | 494 | 580 | 471 | — |
| 145 | — | 568 | | 675 |
| 147 | 496 | 665 | | — |
| 149 | — | 540 | | 707 |
| 151 | 487 | 546 | | — |
| 153 | 494 | 580 | | — |
| 155 | — | 623 | | 703 |
| 159 | 504 | 636 | | 729 |
| 161 | 538 | 582 | | 775 |
| 163 | — | 653 | | — |
| 165 | — | 633 | | — |
| 167 | 522 | 548 | | 714 |
| 169 | 509 | 557 | | — |
| 171 | — | 641 | 383 | 737 |
| 173 | 530 | 627 | | 774 |
| 175 | — | 591 | | 716 |
| 177 | 530 | 600 | 445 | 765 |
| 179 | — | 550 | | — |
| 181 | — | 552 | | 768 |
| 183 | 516 | 562 | | 727 |
| 185 | 477 | 654 | | 686 |
| 187 | — | 577 | 455 | 111 |
| 189 | — | 667 | | — |
| 191 | 527 | 553 | | 733 |
| 193 | — | 664 | | 770 |
| 195 | 513 | 559 | | — |
| 197 | — | 621 | | 764 |
| 199 | — | 650 | 421 | 711 |
| 201 | 483 | 570 | | 700 |
| 203 | — | 601 | | — |
| 205 | 474 | 626 | | 758 |
| 207 | 505 | 590 | | 722 |
| 209 | 482 | 661 | | 706 |
| 211 | 502 | 620 | | 762 |
| 213 | 529 | 607 | 349 | 732 |
| 215 | — | 558 | | 753 |
| 217 | 512 | 611 | | 695 |
| 219 | — | 615 | | 696 |
| 221 | 531 | 671 | | 751 |
| 223 | 533 | 625 | | 749 |
| 225 | 511 | 616 | | 676 |
| 229 | 532 | 630 | | 719 |
| 231 | — | 610 | | 737 |
| 233 | — | 583 | | 769 |
| 235 | — | 575 | | — |
| 237 | — | 656 | | 717 |
| 239 | 526 | 643 | | 679 |
| 241 | 508 | 566 | | 709 |
| 245 | 478 | 561 | | 738 |
| 247 | 479 | 609 | | 689 |
| 249 | 500 | 657 | | — |
| 251 | 534 | 594 | | 688 |
| 253 | — | 551 | | 761 |
| 257 | 521 | 646 | 363 | 712 |
| 259 | — | 541 | | 680 |
| 261 | 491 | 584 | | 698 |
| 263 | — | 638 | 385 | 725 |
| 265 | 486 | 618 | | 746 |
| 267 | 480 | 624 | | 755 |
| 269 | — | 662 | | 759 |
| 271 | — | 556 | | — |
| 273 | 523 | 613 | | 726 |
| 275 | 473 | 652 | | 739 |
| 277 | 536 | 596 | 371 | 691 |
| 279 | 517 | 605 | | 685 |
| 281 | — | 544 | | — |
| 283 | — | 573 | | — |
| 285 | 498 | 564 | | 681 |
| 287 | 525 | 669 | | 779 |
| 289 | — | 644 | 401 | — |
| 291 | 506 | — | | 678 |
| 293 | 485 | 622 | 365 | 778 |
| 295 | 514 | 572 | | 690 |
| 297 | — | 574 | | 766 |
| 299 | — | 598 | | 754 |
| 301 | — | 547 | | — |
| 303 | 539 | 585 | | 721 |
| 305 | 476 | 660 | | 740 |
| 307 | — | 549 | | 705 |
| 309 | 537 | 629 | | 684 |
| 311 | 475 | 628 | | 687 |
| 313 | — | 619 | 403 | 747 |
| 315 | — | 555 | | 744 |
| 317 | — | 672 | | 728 |
| 319 | 519 | 604 | | 718 |
| 321 | 531 | 639 | 377 | 736 |
| 323 | — | 645 | | 701 |
| 325 | 493 | 647 | | 710 |
| 327 | — | 588 | | 730 |
| 329 | 499 | 586 | | 692 |
| 331 | — | 563 | | — |
| 333 | — | 637 | | 767 |
| 335 | — | 663 | | 724 |
| 337 | 520 | 634 | | 772 |
| 339 | 507 | 576 | | 674 |
| 341 | — | 542 | | — |

What is claimed is:

1. An isolated polynucleotide comprising a plant nucleotide sequence
(a) selected from the group consisting of SEQ ID NOs: 1 to 341 or a fragment thereof which encodes a partial-length polypeptide having substantially the same activity as the full-length polypeptide;
(b) having substantial similarity to (a);
(c) having at least 15 nucleotides and capable of hybridizing to (a) or the complement thereof under stringent conditions;
(d) having at least 15 nucleotides and capable of hybridizing to a nucleic acid comprising 50 to 200 or more consecutive nucleotides of a nucleotide sequence given in SEQ ID NOs: 1 to 341 or the complement thereof under stringent conditions;
(e) complementary to (a), (b) or (c); or
(f) which is a reverse complement of (a), (b) or (c).

2. An isolated polynucleotide comprising a nucleotide sequence having at least 70% nucleic acid sequence identity with the polynucleotide of claim 1 or the complement thereof.

3. An isolated polynucleotide comprising a nucleic acid sequence having at least 80% nucleic acid sequence identity with the polynucleotide of claim 1 or the complement thereof.

4. An isolated polynucleotide comprising a nucleic acid sequence having at least 90% nucleic acid sequence identity with the polynucleotide of claim 1 or the complement thereof.

5. An isolated polynucleotide comprising a nucleic acid sequence having at least 98% nucleic acid sequence identity with the polynucleotide of claim 1 or the complement thereof.

6. The polynucleotide of claim 1, wherein the polynucleotide comprises a plant nucleotide sequence encoding a polypeptide which modulates gene expression through posttranscriptional gene silencing.

7. The polynucleotide of claim 6, wherein the polynucleotide comprises a plant nucleotide sequence encoding a polypeptide that is substantially similar to a polypeptide with a amino acid sequence selected from the group consisting of SEQ ID NOs: 2 to 342, or a fragment thereof which has substantially the same activity as the full-length polypeptide.

8. A vector comprising the polynucleotide of claim 1.

9. An expression cassette comprising the polynucleotide of claim 1, operably linked to a regulatory sequence.

10. The expression cassette of claim 9, wherein the regulatory sequence is selected from the group consisting of a promoter, an operator, an enhancer, a repressor binding site and a transcription factor binding site.

11. The expression cassette of claim 9, wherein the polynucleic acid segment is oriented relative to the promoter such that an antisense message is transcribed.

12. A cell comprising the expression cassette of claim 9.

13. The cell of claim 12, wherein the cell is a plant cell.

14. The cell of claim 12, wherein the cell is a monocotyledonous cell, a dicotyledonous cell, a cereal plant cell, a Rosidea cell, a Brassicales cell, an Arabidopsis cell, a rice plant cell, a wheat plant cell, a barley plant cell or a maize plant cell.

15. A recombinant cell, wherein the genome of the cell is augmented with the expression cassette of claim 9.

16. The recombinant cell of claim 15, wherein the cell is a plant cell.

17. A mutagenesis cassette comprising an intervening nucleic acid sequence linked on both ends to a flanking nucleic acid sequence that hybridizes under low stringency conditions to a nucleic acid sequence selected from the group consisting of SEQ ID NOs: 1 to 341, or a complement thereof.

18. The mutagenesis cassette of claim 17, wherein the intervening nucleic acid sequence is a selectable marker.

19. A vector comprising the mutagenesis cassette of claim 17.

20. A polypeptide comprising an amino acid sequence encoded by a nucleic acid sequence having at least 70% sequence identity with a nucleic acid sequence selected from the group consisting of SEQ ID NOs: 1 to 341 or a complement thereof.

21. A polypeptide comprising an amino acid sequence encoded by a nucleic acid sequence having at least 80% sequence identity with a nucleic acid sequence selected from the group consisting of SEQ ID NOs: 1 to 341, or a complement thereof.

22. A polypeptide comprising an amino acid sequence encoded by a nucleic acid sequence having at least 90% sequence identity with a nucleic acid sequence selected from the group consisting of SEQ ID NOs: 1 to 341, or a complement thereof.

23. A polypeptide comprising an amino acid sequence encoded by a nucleic acid sequence having at least 98% sequence identity with a nucleic acid sequence selected from the group consisting of SEQ ID NOs: 1 to 341, or a complement thereof.

24. The polypeptide of claim 20, wherein the polypeptide modulates gene expression by posttranscriptional gene silencing.

25. A method to modulate gene expression within a cell by posttranscriptional gene silencing comprising:
a) introducing into a cell a polynucleotide having at least 70% nucleic acid sequence identity with a nucleic acid sequence selected from the group consisting of SEQ ID NOs: 1 to 341, or a complement thereof, operably linked to a regulatory sequence; and
(b) expressing the polynucleotide in the cell to form a product, wherein the product modulates gene expression within the cell.

26. The method of claim 25, wherein the cell is a monocotyledonous cell, a dicotyledonous cell, a cereal plant cell, a Rosidea cell, a Brassicales cell, an Arabidopsis cell, a rice plant cell, a wheat plant cell, a barley plant cell or a maize plant cell.

27. The method of claim 25, wherein the regulatory sequence is selected from the group consisting of a promoter, an operator, an enhancer, a repressor binding site and a transcription factor binding site.

28. A method for isolating a polynucleic acid fragment containing a regulatory element that modulates expression of a polynucleic acid segment within a cell by posttranscriptional gene silencing, comprising:
a) hybridizing an oligonucleotide probe, wherein said oligonucleotide probe hybridizes to a polynucleic acid segment having at least 70% nucleic acid sequence identity with a nucleic acid sequence selected from the group consisting of SEQ ID NOs: 1 to 341 and having expression that is modulated within a cell by posttranscriptional gene silencing, to a polynucleic acid fragment that corresponds to genomic DNA obtained from the cell to form a complex, wherein the polynucleic acid fragment comprises the regulatory element and the polynucleic acid segment; and
b) isolating the polynucleic acid fragment from the complex formed by hybridization of the oligonucleotide to the polynucleic acid fragment containing the regulatory element.

29. The method of claim 28, further comprising sequencing the isolated polynucleic acid fragment.

30. The method of claim 28, wherein the oligonucleotide probe hybridizes under low stringency conditions to a polynucleic acid segment selected from the group consisting of SEQ ID NOs: 1 to 341, or a complement thereof.

31. The method of claim 28, wherein the cell is a plant cell.

32. A method for isolating the regulatory element from the polynucleic acid fragment of claim 28, comprising:
a) screening for expression of a detectable marker in cells transformed with a vector that encodes the detectable marker and contains a portion of the polynucleic acid fragment, wherein the portion of the polynucleic acid fragment causes expression of the detectable marker to be modulated by posttranscriptional gene silencing; and
b) isolating the regulatory element from the vector obtained from the cell wherein expression of the detectable marker is modulated by posttranscriptional gene silencing.

33. A regulatory element isolated according to the method of claim 32.

34. A method for obtaining an amplification product containing a regulatory element that modulates expression of a polynucleic acid segment in a cell by posttranscriptional gene silencing, comprising:
a) amplifying a nucleic acid sequence that contains the regulatory element by hybridizing a first oligonucleotide primer to a polynucleic acid fragment comprising the polynucleic acid segment and the regulatory element, and hybridizing a second degenerate oligonucleotide primer to the polynucleic acid fragment at a position that is 5′ or 3′ to an open reading frame containing the polynucleic acid segment, and amplifying the nucleic acid sequence between the first primer and the second primer by polymerase chain reaction to form an amplification product, wherein the polynucleic acid fragment is genomic DNA from the cell; and
b) isolating the amplification product formed by the polymerase chain reaction between the first and the second primer to obtain the regulatory element.

35. The method of claim 34, further comprising sequencing the amplification product.

36. The method of claim 34, wherein the first oligonucleotide primer hybridizes to a nucleic acid segment selected from the group consisting of SEQ ID NOs: 1 to 341, or a complement thereof.

37. An amplification product isolated according to the method of claim 34.

38. A method for isolating the regulatory element of claim 34 from the amplification product comprising:
a) screening for expression of a detectable marker in cells that were transformed with a vector that encodes the detectable marker and contains a portion of the amplification product, wherein the portion of the amplification product causes expression of the detectable marker to be modulated by posttranscriptional gene silencing; and
b) isolating the regulatory element from the vector obtained from the cell wherein expression of the detectable marker is modulated by posttranscriptional gene silencing.

39. A regulatory element isolated according to the method of claim 38.

40. An expression cassette comprising the regulatory element of claim 33 operably linked to an open reading frame.

41. An expression cassette comprising the regulatory element of claim 39 operably linked to an open reading frame.

42. A method to augment a plant genome comprising:
a) contacting a plant cell with the polynucleotide of claim 1 to produce a transformed plant cell; and
b) growing the transformed plant cell to produce a differentiated transformed plant.

43. The method of claim 42, wherein the plant cell is selected from the group consisting of a monocotyledonous cell, a dicotyledonous cell, a cereal plant cell, a wheat plant cell, a rice plant cell, a barley cell, a maize plant cell, a Rosidea cell, a Brassicales cell, and an Arabidopsis cell.

44. A transgenic plant comprising a polynucleotide of claim 1.

45. A transgenic plant comprising the polynucleotide of claim 2.

46. The plant of claim 45, wherein the plant is a monocotyledonous plant, a dicotyledonous plant, a cereal plant, a wheat plant, a rice plant, a barley plant, a maize plant, a Rosidea plant, a Brassicales plant or an Arabidopsis plant.

47. A product produced by a plant of claim 45, wherein the product is a seed, a fruit, a vegetable, a transgenic plant, a progeny plant or products of the progeny plant.

48. A method to create a mutant cell comprising: contacting a cell with the mutagenesis cassette of claim 18 to produce a cell having a deletion in a gene that is regulated by posttranscriptional gene silencing.

49. The method of claim 48, wherein the cell is a plant cell.

50. A method for identifying a first polypeptide that forms a complex with a second polypeptide within a cell, comprising:
a) expressing within the cell the second polypeptide, wherein said second polypeptide is a fusion polypeptide that comprises a marker polypeptide and a polypeptide having expression that is modulated by posttranscriptional gene silencing, so that a complex is formed that contains the first polypeptide and the second polypeptide; and
b) separating the complex by using the marker polypeptide and identifying the first polypeptide contained within the complex.

51. The method of claim 50, wherein the second polypeptide is encoded by a polynucleic acid sequence selected from the group consisting of SEQ ID NOs: 1 to 341, or a complement thereof.

52. The method of claim 50, wherein the marker polypeptide is glutathione-S-transferase.

53. The method of claim 50, wherein the marker polypeptide is an epitope for an antibody.

54. A method for determining a polynucleotide that encodes a first polypeptide that interacts with a second polypeptide whose expression is modulated by posttranscriptional gene silencing, comprising:
a) mating a first haploid yeast cell, wherein said first haploid yeast cell contains a construct comprising a polynucleotide that encodes the first polypeptide fused to a DNA-binding domain or to an RNA polymerase activation domain, with a second haploid yeast cell, which contains a construct comprising a nucleic acid sequence selected from SEQ ID NOs: 1 to 341 fused to a DNA-binding domain or an RNA polymerase activation domain, wherein the first haploid yeast strain and the second haploid yeast strain do not contain a construct that encodes for the same DNA-binding domain or RNA-polymerase activation domain and either of the first or the second haploid yeast strain comprises a two-hybrid reporter gene; and
b) determining the sequence that encodes the first polypeptide by sequencing the construct that expresses the first polypeptide as indicated by measuring the activation of the two-hybrid reporter gene in the diploid yeast strain.

55. An isolated polynucleotide segment that hybridizes under low stringency conditions to a nucleic acid sequence selected from the group consisting of SEQ ID NOs: 1 to 341, or a complement thereof.

56. An isolated polynucleotide segment that encodes a polypeptide having substantial similarity to a polypeptide encoded by a nucleic acid sequence selected from the group consisting of SEQ ID NOs: 1 to 341, or a complement thereof.

57. An isolated polynucleotide segment having a similarity value less than 1×10⁻⁵ as determined by BLAST search using default parameters to a nucleic acid sequence selected from the group consisting of SEQ ID NOs: 1 to 341, or a complement thereof.

58. An isolated polynucleotide segment having a similarity value less than 1×10⁻¹⁰ as determined by BLAST search using default parameters to a nucleic acid sequence selected from the group consisting of SEQ ID NOs: 1 to 341, or a complement thereof.

59. An isolated polynucleotide segment having a similarity value less than 1×10⁻²⁰ as determined by BLAST search using default parameters to a nucleic acid sequence selected from the group consisting of SEQ ID NOs: 1 to 341, or a complement thereof.

60. An isolated polynucleotide segment having a similarity value less than 1×10⁻²⁵ as determined by BLAST search using default parameters to a nucleic acid sequence selected from the group consisting of SEQ ID NOs: 1 to 341, or a complement thereof.

61. A cell comprising the isolated polynucleotide segment of claim 57.

62. A transgenic plant comprising the polynucleic acid segment of claim 57.

63. A computer-readable medium having stored thereon a data structure comprising:
a) at least one nucleic acid sequence that encodes a polypeptide which confers post-transcriptional gene silencing onto a plant and has at least 70% nucleic acid sequence identity to a nucleic acid sequence selected from the group consisting of SEQ ID NOs: 1 to 341, or a complement thereof; and
b) a module receiving the nucleic acid sequence which compares the nucleic acid sequence to another nucleic acid sequence.

64. The computer readable medium of claim 63, wherein the medium is selected from the group consisting of magnetic tape, optical disk, CD-ROM, random access memory, volatile memory, non-volatile memory and bubble memory.

65. A computer-readable medium having stored thereon computer executable instructions for performing a method comprising:
a) receiving at least one nucleic acid sequence having at least 70% nucleic acid sequence identity to a nucleic acid sequence selected from the group consisting of SEQ ID NOs: 1 to 341, 473 to 539; 540 to 673, and 674 to 779, or a complement thereof; and
b) comparing the nucleic acid sequence to another nucleic acid sequence.

66. The computer readable medium of claim 65, wherein the medium is selected from the group consisting of magnetic tape, optical disk, CD-ROM, random access memory, volatile memory, non-volatile memory and bubble memory.

67. A method of determining the silencing status of a plant comprising
(a) obtaining an RNA expression profile for a subset of genes comprising one or more genes the expression of which is modulated by posttranscriptional gene silencing (PTGS); and
(b) comparing the expression profile obtained with the profile of a plant of the same species that does not have posttranscriptional gene silencing.

The application's sequence listing, which the Patent Office published only in electronic form, follows.

SEQUENCE LISTING (782 sequences)

SEQ ID NO: 1 - DNA, 651 bp, Oryza sativa
atggcgagggtacagctctgggtggccgccgcgtgcgccgtcgtgctcgcgctcgccgcgccctcgctcgccggcgaccccgacatgctccaggacgtctgcgtcgccgacttggcgtccccggtgaagctgaacgggttcccgtgcaaggcgaacgtgacggcggacgacttcttcttcgcggggctgaagaaccccggcaacaccaacaacccggcggggtcgaacgtgacggcggcgaacgtgcagtcgttcccgggggtgaacacgctgggcgtgtctatggcgaggatcgactacgcgccggggggacagaacccgccgcacacgcacccgcgcgccaccgagatcatcttcgtcctcgagggcgtcctcgaggtgggcttcatcaccactgccaacaagctcttcaccaagactgtcaccgccggcgaggtttttgtttttccgcgcggccttgtccacttccagcagaaccgcggccacggccccgccgccgtcattgccgccttcaacagccagctccagggcacccaggccattgccgccacgctttttgccgccgcgccgcccgtgccgtccgacgtcctcgccaaggccttccgcgtcgacgtcccgcaggtggacgccatcaaggccaagttcaagtga

SEQ ID NO: 2 - protein, 216 aa, Oryza sativa
MARVQLWVAAACAVVLALAAPSLAGDPDMLQDVCVADLASPVKLNGFPCKANVTADDFFFAGLKNPGNTNNPAGSNVTAANVQSFPGVNTLGVSMARIDYAPGGQNPPHTHPRATEIIFVLEGVLEVGFITTANKLFTKTVTAGEVFVFPRGLVHFQQNRGHGPAAVIAAFNSQLQGTQAIAATLFAAAPPVPSDVLAKAFRVDVPQVDAIKAKFK

SEQ ID NO: 3 - DNA, 564 bp, Oryza sativa
atggcggaccagctctccgaagagcagattggagagttcagggaggccttcagcctcttcgacaaggacggcgacggttctatcaccaccaaggagctaggaaccgtgatgcgaagtctagggcagaacccaacggaggcggagctgcaggacatgatcagcgaggtggacacggacagcaacggcaacatcgaattcaaggagttcctgggcctgatggcgcgcaagctgagggacaaggactccgaggaggagctgaaggaggcattccgcgtcttcgacaaggaccagaacggtttcatctctgccaccgagctccgccacgtgatggccaacatcggggagcggctcaccgacgaggaggtcggcgagatgatcagcgaggccgacgtcgacggcgacgggcagatcaactacgaggagttcgtcaagtgcatgatggccaagaagaggaggaagaggatagaggagaagagggaccacgacggcggcagcaggacgaagagtgcagggccctccgccgcgccggcgagcaagcgtggccagaagtgcgtgatcctgtaa

SEQ ID NO: 4 - protein, 187 aa, Oryza sativa
MADQLSEEQIGEFREAFSLFDKDGDGSITTKELGTVMRSLGQNPTEAELQDMISEVDTDSNGNIEFKEFLGLMARKLRDKDSEEELKEAFRVFDKDQNGFISATELRHVMANIGERLTDEEVGEMISEADVDGDGQINYEEFVKCMMAKKRRKRIEEKRDHDGGSRTKSAGPSAAPASKRGQKCVIL

SEQ ID NO: 5 - DNA, 657 bp, Oryza sativa
atgctcagcttctcgtcctccgcctcgtcgtgctcctccggcggcggtggcgccgccgtggccgctgcggcggcggctggcggggcgatgccgctgtactatggcacgcctgcttcttgctcaggattgagctcagtgagcttgagcagcagcatgcagggtgcaatggccagggtgaggggtcccttcacgccgtctcagtggatcgagctggagcaccaggcgctgatatacaagtacttggctgctaatagccctgtaccacacagcctcctcatccccatcaggaggagcctcacatcgccctactcacctgcctactttggctcaagcacattgggatggggatctttccagctgggctactccggcagcgcggatccggagcccggccggtgccgccggacggacggcaagaaatggcggtgctcgagggatgcggtcgccgaccagaagtactgtgagcgacacatgaaccggggacgccaccgttcaagaaagcatgtgggaaggccagcctggccatgcccgggaaagcgatgcccgcgggcggtggccagcagcccgctgcctctgctacccagcctagtgctccggccgcccacagtggcggagctgttgctggcctcgctatcaaccatcagcaccagcaaatga

SEQ ID NO: 6 - protein, 218 aa, Oryza sativa
MLSFSSSASSCSSGGGGAAVAAAAAAGGAMPLYYGTPASCSGLSSVSLSSSMQGAMARVRGPFTPSQWIELEHQALIYKYLAANSPVPHSLLIPIRRSLTSPYSPAYFGSSTLGWGSFQLGYSGSADPEPGRCRRTDGKKWRCSRDAVADQKYCERHMNRGRHRSRKHVGRPAWPCPGKRCPRAVASSPLPLLPSLVLRPPTVAELLLASLSTISTSK

SEQ ID NO: 7 - DNA, 489 bp, Oryza sativa
atggccccggttgccgtgggcgacaccctccccgacggccagctggggtggttcgacggggaggacaagctgcagcaggtctccgtccacggcctcgccgccggcaagaaggtcgtcctcttcggcgtccccggtgccttcaccccgacctgcagcaatcagcatgtgccaggattcataaatcaggctgagcagctcaaagccaagggtgtagacgacatcttgcttgtcagtgttaacgacccctttgtcatgaaggcgtgggcaaagtcataccctgagaataagcatgtgaaattccttgccgatggtttgggaacatacaccaaggcacttggtcttgagcttgacctttcggagaaagggcttggtattcgttcgagacggtttgctctccttgctgacaacctcaaggttactgttgcaaacattgaggaaggtggccaattcacaatctctggtgctgaggagatcctcaaggcactgtaa

SEQ ID NO: 8 - protein, 162 aa, Oryza sativa
MAPVAVGDTLPDGQLGWFDGEDKLQQVSVHGLAAGKKVVLFGVPGAFTPTCSNQHVPGFINQAEQLKAKGVDDILLVSVNDPFVMKAWAKSYPENKHVKFLADGLGTYTKALGLELDLSEKGLGIRSRRFALLADNLKVTVANIEEGGQFTISGAEEILKAL

SEQ ID NO: 9 - DNA, 474 bp, Oryza sativa
  misc_feature (96)..(97): n = any nucleotide
  misc_feature (99)..(100): n = any nucleotide
  misc_feature (102)..(102): n = any nucleotide
  misc_feature (105)..(106): n = any nucleotide
atggcgtcaccggccggccaccgttcaccggcggcaacgccgccggcgacggcgacggcgacggcgtggtgctactccgcagggggggcggggggnngnngnctnnaccttgacggcgagcttcatcccggcggcgcaatgtccagggaagccgcagatgaagtaccgcgtgccaacggcggcgagcgggacggtgtcatcgccggagttgaaggtggcgatggggctcgccgccgagcaggcgtcgtagccggccttggtcacctccacgacgtcgtgcgccgccggcgagtacctgaacacgagccggtcaccggcgcggaaggtggcggcggacgcccactgcgcgtagttggtgcgcgtgtcccacgacccggccggtgctcccaccgtgtaggtggtggcgcccatcgccgtcgtcgcgagcaccgccgccgccgccgccacggccacgacgaggagagctctggctga

SEQ ID NO: 10 - protein, 157 aa, Oryza sativa
  X_region (33)..(34): Xaa = any naturally occuring amino acid
  X_region (36)..(36): Xaa = any naturally occuring amino acid
MASPAGHRSPAATPPATATATAWCYSAGGAGGXXLXLDGELHPGGAMSREAADEVPRANGGERDGVIAGVEGGDGARRRAGVVAGLGHLHDVVRRRRVPEHEPVTGAEGGGGRPLRVVGARVPRPGRCSHRVGGGAHRRRREHRRRRRHGHDEESSG

SEQ ID NO: 11 - DNA, 1005 bp, Oryza sativa
atgtgtggaggcgccatcctcgccgagttcatcccggcgccgtcgcgcgccgcggcggcgaccaagcgggtgaccgccagccacctgtggccggccggctccaagaacgccgcccgcggcaagagcaagagcaagaggcagcagaggagcttcgccgacgtcgacgacttcgaggccgccttcgagcagttcgacgatgactccgacttcgacgacgcggaggaagaagacgaaggacacttcgtgttcgcgtccaaatctcgtgtcgtcgccgggcacgacgggcgcgcggcggcgagggcggcgagcaagaagaagcgggggcggcacttccgaggcatccggcagcggccatgggggaagtgggcggcggagatccgcgacccgcacaagggcacgcgcgtctggctcggcacgttcaacaccccggaggaggccgcacgcgcctacgacgtcgaggcgcgccgcctccgcggcagcaaggccaaggtcaacttccccgccacgcccgccgccgcgcgcccacgccgcggcaacacgagagccaccgccgtgccaccgccggcgacagcacccgccgccgccccgccgcgcggactgaagcgagaattctcgccgcctgctgagaccgcgctacctttcttcaccaacggcttcgtcgacctgacgaccgccgcggcgccgccaccggccatgatgatgacgagctccttcaccgacagcgtcgccacgtcggagtccggcgggagccccgccaagaaggcgaggtccgacgacgtcgactcgtccgagggcagcgtcggcggcggcagcgacacgctgggtttcaccgacgagctggagttcgacccgttcatgctgttccagctcccctactccgacggctacgagtccatcgacagcctcttcgccgccggcgacgccaacagcgcgaacaccgacatgaacgccggcgtcaacctgtggagcttcgacgacttcccaatcgacggcgcccttttctga

SEQ ID NO: 12 - protein, 334 aa, Oryza sativa
MCGGAILAEFIPAPSRAAAATKRVTASHLWPAGSKNAARGKSKSKRQQRSFADVDDFEAAFEQFDDDSDFDDAEEEDEGHFVFASKSRVVAGHDGRAAARAASKKKRGRHFRGIRQRPWGKWAAEIRDPHKGTRVWLGTFNTPEEAARAYDVEARRLRGSKAKVNFPATPAAARPRRGNTRATAVPPPATAPAAAPPRGLKREFSPPAETALPFFTNGFVDLTTAAAPPPAMMMTSSFTDSVATSESGGSPAKKARSDDVDSSEGSVGGGSDTLGFTDELEFDPFMLFQLPYSDGYESIDSLFAAGDANSANTDMNAGVNLWSFDDFPIDGALF

SEQ ID NO: 13 - DNA, 645 bp, Oryza sativa
atgagcaccaccatgacgatcccggtgaccccctcgacgccggcgaggaggccccggtacgtcggccgcgacgcgccgaagaagccggacagcagcagctcgtactcctcccggctcgacccgatcagccgcgggaagtcgcacgccaggtgcgtccccgcgtgcgtgcagatgcccagcgcgattgccgtcgcgatgatcttgtggaaggtgatgctgtcgtcgaaggggacgaagaagcgggcccaggaggagcggagccacgtcagcgtgttgcggcagacggggaggaggacgagcgccatgttgagcttgagcgtctcggcggcgcccttcgccgtcgggaggcagtaccccatcacccggaacgccggcgtgcggcggtactgcacgaacttccacgcgaacagtcccgccatggcggcgaaccacagcgccagcacccacgcgcgccgccagttctcctccgccgccacctgcgccctcgccgccgctcgccgcgggctccaccgccgcctccagtcgttcctcctcccctccgactgcccctgcccctgcccttgccctccttgctgccctccgccgccgccgccgaggttctggctccactgcgccgtgctgccgctgctgagcggccggctgtag

SEQ ID NO: 14 - protein, 214 aa, Oryza sativa
MSTTMTIPVTPSTPARRPRYVGRDAPKKPDSSSSYSSRLDPISRGKSHARCVPACVQMPSAIAVAMILWKVMLSSKGTKKRAQEERSHVSVLRQTGRRTSAMLSLSVSAAPFAVGRQYPITRNAGVRRYCTNFHANSPAMAANHSASTHARRQFSSAATCALAAARRGLHRRLQSFLLPSDCPCPCPCPPCCPPPPPPRFWLHCAVLPLLSGRL

SEQ ID NO: 15 - DNA, 996 bp, Oryza sativa
atggaggcgcgaggaagcagaggaatgcggctgtggctcctgtccgtggcggtgatggccatggcgatggcgacgaggtcgcaggcgcagctgcaggtcgggtactacgacacgctgtgcccggcggcggagatcatcgtgcaggaggaggtcagcaaggcggtgtccgggaaccccggcatggccgccggcctcgtccgtctccacttccacgactgcttcgtcagggggtgcgacgcgtcggtgctgctggactcgacgcaggggaacagggcggagaaggacgcgcccccgaacacgagcctccgcggcttcgaggtcatcgacagcgccaagtcccgcctcgagacggcctgcttcggcgtcgtctcctgcgccgacgtcctcgccttcgccgcccgggacgccctcgcgctggtgggagggaacgcgtaccaggtgccgggggggaggagagacggcaacgtgtcggtggcgcaggagacgaacgggaacctgccgccgccgtcggcgaacgtggcgcagctgaaccagatgttcggcgccaaggggctcacccaggcggaaatggtggcactgtcgggcgcgcacaccatcggcgtgtcgcactgcagctccttcagcaaccgcctctactcgtcgggccccaacgccgggcaggaccccagcatggaccccagctacgtcgccgcgctgacgacgcagtgcccgcagcagcaggggcagcccgcggcggggatggtgcccatggacgccgtcacgcccaacgcctttgacaccaactactacgccgccattgtcgctaaccggggattggtcagctccgaccaggcgctcctcgccgaccagaccaccgccgcgcaggtcgtcgggtacaccaacaacccggactcgttccagaccgacttcgccgccgccatggtcaagatgggctccatcggcgtgctcaccggcaacgccggcaccatcaggacaaactgcagggtggccagctga

SEQ ID NO: 16 - protein, 331 aa, Oryza sativa
MEARGSRGMRLWLLSVAVMAMAMATRSQAQLQVGYYDTLCPAAEIIVQEEVSKAVSGNPGMAAGLVRLHFHDCFVRGCDASVLLDSTQGNRAEKDAPPNTSLRGFEVIDSAKSRLETACFGVVSCADVLAFAARDALALVGGNAYQVPGGRRDGNVSVAQETNGNLPPPSANVAQLNQMFGAKGLTQAEMVALSGAHTIGVSHCSSFSNRLYSSGPNAGQDPSMDPSYVAALTTQCPQQQGQPAAGMVPMDAVTPNAFDTNYYAAIVANRGLVSSDQALLADQTTAAQVVGYTNNPDSFQTDFAAAMVKMGSIGVLTGNAGTIRTNCRVAS

SEQ ID NO: 17 - DNA, 1002 bp, Oryza sativa
atgggcgctgtggctgcggttcgtgccgcggtcctggtcgtggccgtggccctcgccgcggcggcggccggcgcgtcggcgcagctgtgcgacaagtactacgacgggacgtgcccggacgtgcaccggatcgtgcggcgcgtgctgaagagggcgcggcaggacgacccccgcatcttcgccagcctcacccgcctccacttccacgactgcttcgtccagggttgcgacgcgtcgatcctgctggacaacagcacgagcatcgtgtcggagaagttcgcgacgccgaacaacaactcggcgcgggggtacccggtggtggacgacatcaaggcggcacttgaggaggcctgccccggcgtcgtctcctgcgccgacatcctcgccatcgccgccaagatctccgtcgaactgtccggaggcccccggtggcgcgtgcccctcggccggcgcgacggcaccacggccaacctcaccggcgccgacaataacctccccagcccccgcgacaacctcaccacccttcagcagaagttcgccgccgtcggcctcgacgtcaccgacctcgtcgccctctcaggggcgcacacgttcgggagggtgcagtgccagttcgtgacggacaggctgtacaacttcagcgggacggggaagccggacccgacgctggacgccggctaccggcgggcgctggcgaagagctgcccgcggcggggcgggaactcgtcggcgctgaacgacctggacccgaccacgccggacgccttcgacaagaactacttcgccaacatcgaggtgaaccgcggcttcctccagtccgaccaggagctcctgtccacgccgggcgcgcccacggcggcgatcgtcaacagcttcgccatcagccagaaggccttcttcaagagcttcgccaggtccatggtcaacatggggaacatccagccgctgacgggcagccagggggaggtccggaagagctgcagatttgtcaatggaagttaa

SEQ ID NO: 18 - protein, 333 aa, Oryza sativa
MGAVAAVRAAVLVVAVALAAAAAGASAQLCDKYYDGTCPDVHRIVRRVLKRARQDDPRIFASLTRLHFHDCFVQGCDASILLDNSTSIVSEKFATPNNNSARGYPVVDDIKAALEEACPGVVSCADILAIAAKISVELSGGPRWRVPLGRRDGTTANLTGADNNLPSPRDNLTTLQQKFAAVGLDVTDLVALSGAHTFGRVQCQFVTDRLYNFSGTGKPDPTLDAGYRRALAKSCPRRGGNSSALNDLDPTTPDAFDKNYFANIEVNRGFLQSDQELLSTPGAPTAAIVNSFAISQKAFFKSFARSMVNMGNIQPLTGSQGEVRKSCRFVNGS

SEQ ID NO: 19 - DNA, 1809 bp, Oryza sativa
atgtgctctgggccgcgcaagccgtccacaccgccgctgccgcagcagcagaaggaggcgacggtgatggcggcgtccttgcttcttgagctggcggcagcggacgacgtggcggcggtgaggagggtcgtggaggaggagaaggtgtctcttggcgtggctgggttgtggtatgggccttcggcgagcggcgtggcgaggctcgggatggagcggaggacggcggcgatggtggcggcgctgtacgggagcacgggggtgcttgggtatgtcgtggcggcagcgccggcggaggccgcgcgcgcgtcggagacggatggggccacgccgctgcacatggcggctgccggtggcgcggcgaacgcggtcgcggccacgcgcctgttgctcgccgcgggggcgtcggtcgacgcgctctcggcttcggggctccgcgccggtgacctcctcccgcgcgccaccgcggcggagaaggccatccggctgctgctcaagtcgccggccgtgtcgccgtcgtcgtcgccgaagaagtcggcctcgccgccgtcgccgccgccgccgcaggaggcgaagaaggagtacccgcctgacctgacgctgcccgacctcaagagcggactgttcagcaccgacgagttccgcatgtacagcttcaaggtgaagccgtgctcccgcgcctactcccatgactggaccgagtgccccttcgtccaccccggcgagaacgcgcgccgccgcgaccctcgccgctactcctacagctgcgtgccttgcccggagttccgcaagggcggctcgtgccgcaagggcgacgcgtgcgagtacgcccatggcgtgttcgagtgctggctccacccggcgcagtacaggacgcgcctctgcaaggacgaggtcggctgcgcgcgccgcatctgcttcttcgcccacaagcccgacgagctccgcgccgtcaacccctccgccgtgtccgtcggcatgcagcccaccgtatcgtcgccgcgctcctcgcccgcccaacggtctcgacatggcggcggcggcggcggcgatgatgagccccgcctggccgtcgtccccagcgagccgcctcaagacggcgctcggcgcgcgggagctcgacttcgacctcgagatgctcgcgctggaccagtaccagcagaagctgttcgacaaggtgtccggcgcgccgtcgccgagggcgagctggggcgccgcggcgaacggcctcgccaccgcgtcgccggcgagggccgtgccggactacaccgacctgctcggctccgtcgacccggccatgctgtcccagctccacgcgctgtccctcaagcaggccggcgacatgcccgcgtacagctccatggcggacaccacgcagatgcacatgccgacctcgccgatggtgggcggggcgaacaccgagttcgggctggaccactccatggcgaaggcgatcatgagctcccgcgcctcggcgttcgccaagcgcagccagagcttcatcgaccgcggaggccgcggccccggcggcgccgttcgctcatgtcgccggcgacgaccggcgcgccgtccattctttcggactggggctcgccggacggcaagctggactggggcgtccagggcgacgagctgcacaagctccgcaagtcggcgtcgttcgcgttccgcggccaatccgccatgccggtggcgacgcacgccgcggcggcggagccggacgtgtcatgggtgaactctcttgtcaaggacggccacgccgccggcgacatattcgcgcagtggccggagcaggagcagatggtggcatga

SEQ ID NO: 20 - protein, 602 aa, Oryza sativa
MCSGPRKPSTPPLPQQQKEATVMAASLLLELAAADDVAAVRRVVEEEKVSLGVAGLWYGPSASGVARLGMERRTAAMVAALYGSTGVLGYVVAAAPAEAARASETDGATPLHMAAAGGAANAVAATRLLLAAGASVDALSASGLRAGDLLPRATAAEKAIRLLLKSPAVSPSSSPKKSASPPSPPPPQEAKKEYPPDLTLPDLKSGLFSTDEFRMYSFKVKPCSRAYSHDWTECPFVHPGENARRRDPRRYSYSCVPCPEFRKGGSCRKGDACEYAHGVFECWLHPAQYRTRLCKDEVGCARRICFFAHKPDELRAVNPSAVSVGMQPTVSSPRSSPAQRSRHGGGGGGDDEPRLAVVPSEPPQDGARRAGARLRPRDARAGPVPAEAVRQGVRRAVAEGELGRRGERPRHRVAGEGRAGLHRPARLRRPGHAVPAPRAVPQAGRRHARVQLHGGHHADAHADLADGGRGEHRVRAGPLHGEGDHELPRLGVRQAQPELHRPRRPRPRRRRSLMSPATTGAPSILSDWGSPDGKLDWGVQGDELHKLRKSASFAFRGQSAMPVATHAAAAEPDVSWVNSLVKDGHAAGDIFAQWPEQEQMVA

SEQ ID NO: 21 - DNA, 1029 bp, Oryza sativa
atgtgtggaggatccattctcggcgaccttcacttgccggtgcggcggacagtgaacgccggtgacctgtggggagacgccggcaagggtagagatggtggcgacggcttgaagaagaggaaggggagttcttgggatttcgatgttgattgcgatgatgatgatgatgatgactttgaggctgattttgaggagtttgaggatgactatggcgatgatgatgatgtgggtttcggggacgacgaccaagaatccgacatgaacggtctcaagctcgccggattcagcaccacgaagctcggcctcggcggcagcaggaagaggaagacgcgataccgagggatccggcagcggccatgggggaaatgggcggcggagatcagggacccccgcaagggcgtccgcgtctggctcggcacgttcggcaccgccgaggaggccgccatggcgtacgacgtcgaggcacgccgcatccgcggcaagaaagccaaggtcaacttccccgacgccgccgccgccgccccgaagcggccacggcgttcttcggcgaagcattcgccgcagcagcagaaggccaggtcgtcgtcgtcgtcgccggcgagcctgaacgccagcgacgccgtgtccaagtccaacaacaaccgcgtcagctcggctgggagcagcaccgacgccaccgccgccgccatcgccatcgacgacggcgtcaagctcgagctgctctcggagacggatccttctccgcccatggccgccgccgccgccgcgtggctcgacgcgttcgagctgaacgatcttgacggatcaagatgcaaggacaacgcattcgatcaccagattcacaaggtagaagcggctgtcgctgatgaattcgcgttctacgacgatccgagctacatgcagctgggttaccagctcgatcagggcaactcgtacgagaacatcgacgcgctcttcggcggcgaggccgtcaacattggtggactctggagcttcgacgacatgccaatggagttcagagcttattga

SEQ ID NO: 22 - protein, 342 aa, Oryza sativa
MCGGSILGDLHLPVRRTVNAGDLWGDAGKGRDGGDGLKKRKGSSWDFDVDCDDDDDDDFEADFEEFEDDYGDDDDVGFGDDDQESDMNGLKLAGFSTTKLGLGGSRKRKTRYRGIRQRPWGKWAAEIRDPRKGVRVWLGTFGTAEEAAMAYDVEARRIRGKKAKVNFPDAAAAAPKRPRRSSAKHSPQQQKARSSSSSPASLNASDAVSKSNNNRVSSAGSSTDATAAAIAIDDGVKLELLSETDPSPPMAAAAAAWLDAFELNDLDGSRCKDNAFDHQIHKVEAAVADEFAFYDDPSYMQLGYQLDQGNSYENIDALFGGEAVNIGGLWSFDDMPMEFRAY

SEQ ID NO: 23 - DNA, 498 bp, Oryza sativa
atggcaacctccagcttgctagtagctgcagtgctcgcggcggcggccatggcggcgacggcgcagaactcggcgcaggactacgtggacgcgcacaacgcggcgaggtccgacgtcggggtggggccggtgagctgggacgacacggtggcggcgtacgcggagagctacgcggcgcagcggcagggcgactgcgcgctggagcactcggactccggcgggaagtacggcgagaacatcttctggggctccgccggcggggactggacggcggcgagcgcggtgtcgtcgtgggtggcggagaagcagtggtacgaccacgacagcaacagctgctcggcgccggcggggagctcgtgcgggcactacacgcaggtggtgtggagcaactcgacggcgatcggctgcgcccgcgtcgtctgcgacaacagcctcggcgtcttcatcacctgcaactactcgccgccgggcaacgtcgacggcgaatctccctactag

SEQ ID NO: 24 - protein, 165 aa, Oryza sativa
MATSSLLVAAVLAAAAMAATAQNSAQDYVDAHNAARSDVGVGPVSWDDTVAAYAESYAAQRQGDCALEHSDSGGKYGENIFWGSAGGDWTAASAVSSWVAEKQWYDHDSNSCSAPAGSSCGHYTQVVWSNSTAIGCARVVCDNSLGVFITCNYSPPGNVDGESPY

SEQ ID NO: 25 - DNA, 402 bp, Oryza sativa
atggcgtccaaggcgttcgctctgttcctggccgtgaacctcgtcgtgctcggggtggcaagcgcctgcggcggcagcccgtcgtgcccgacgccgacgccgtcgaccccgacaccgtcaacgccgacgccgacgccgtcggcgttcgggaggtgcccccgcgacgcgctgaagctgggcgtgtgcgccaacgtgctgggcctgatcaaggccaaggtgggcgtgcctccggcggagccgtgctgcccgctgctggaggggctcgtcgacctcgaggcggcggtgtgcctctgcacggccatcaggggcaacatcctcggaatcaacctcaacctccccatcgacctcagcctcatcctcaactactgcggcaagaccgtccccaccggcttcaagtgctaa

SEQ ID NO: 26 - protein, 133 aa, Oryza sativa
MASKAFALFLAVNLVVLGVASACGGSPSCPTPTPSTPTPSTPTPTPSAFGRCPRDALKLGVCANVLGLIKAKVGVPPAEPCCPLLEGLVDLEAAVCLCTAIRGNILGINLNLPIDLSLILNYCGKTVPTGFKC

SEQ ID NO: 27 - DNA, 645 bp, Oryza sativa
  misc_feature (547)..(547): n = any nucleotide
atggctgacgatttgggccctcccactgtgctccagaagatacatgggcagtccatgatgttcagcaagatctcaccttattctttgatgaagaatcccgcactctacaatgccaacacttcttacagtgtgcctctgaagtcatacaatgggatggatgggaacaatgggttctcatctgtcacatctgtatccccagtctttgcttctgccccaaaggagaaaggtctttctgggtttatgattgacttcatgatgggtggagtttcagctgctgtctccaagactgctgctgctcccattgagcgaatcaagcttctcattcaaaaccaggatgaaatgatcaagagtggtaggctctctcacccatacaaaggtattgcggactgctttggccgcacaattaaggatgaaggtgtgattgcactgtggagagggaacactgctaatgtcatccgttactttcctacccaggccttgaactttgccttcaaagaccatttcaagcgcatgttcaactttaagaaggacaaggatggttactggnaagtggtttgctggaaacctggcttctggaggagctgctgggggcttgctctctcttctttggggattctctggatatgctcgtactcgtctggctaa

SEQ ID NO: 28 - protein, 214 aa, Oryza sativa
  X_region (183)..(183): Xaa = any naturally occuring amino acid
MADDLGPPTVLQKIHGQSMMFSKISPYSLMKNPALYNANTSYSVPLKSYNGMDGNNGFSSVTSVSPVFASAPKEKGLSGFMIDFMMGGVSAAVSKTAAAPIERIKLLIQNQDEMIKSGRLSHPYKGIADCFGRTIKDEGVIALWRGNTANVIRYFPTQALNFAFKDHFKRMFNFKKDKDGYWXVVCWKPGFWRSCWGLALSSLGILWICSYSSG

SEQ ID NO: 29 - DNA, 453 bp, Oryza sativa
atggccaagccaagcgccgctccggtgaccggcgtccccgtcggctccgccgcctggtccaccggcctctgcgactgcttcgacgactgcggcctatgctgcttgacgtgctggtgcccgtgcatcacgttcgggagggtggcggagatggtggacaggggctcgacgtcgtgcggcaccggcggcgcgctgtacgggctgctgtgcgcgttcaccgggtgccagtggatctactcctgcacctaccggggcaagatgcgcactcagtacgggctcgccgaagccggctgcgccgactgctgcgtccacttctgctgcgagccatgcgcgctgtgccaggagtaccgcgagctcgtcgcccgcggctacgaccccaagctcggctggcacctcaacgccgaccgcgccgccgccgccggcgccgctcccgccgtgcagtacatgggccgctaa

SEQ ID NO: 30 - protein, 150 aa, Oryza sativa
MAKPSAAPVTGVPVGSAAWSTGLCDCFDDCGLCCLTCWCPCITFGRVAEMVDRGSTSCGTGGALYGLLCAFTGCQWIYSCTYRGKMRTQYGLAEAGCADCCVHFCCEPCALCQEYRELVARGYDPKLGWHLNADRAAAAGAAPAVQYMGR

SEQ ID NO: 31 - DNA, 1050 bp, Oryza sativa
atgagggagctgctcggctccttcaccaacgacgtcctgtgccgcgccgtgtgcgggaagtcgtcgttccggcgagaaggccggaacaagctgttcatggagctcgccgccggcaacgctgatcagtacgctggcttcaacctggaagactacttcccgagcttggcgaaggtggatctgctgaggcgagtggtgagcgccgacaccaagaagctcaaagagaagtgggacagtgttcttggtgacatcgtaagcgagcatgaaaagaaatcgtcgctgcgtcgtgacgatcaagtacagatggatgatgaccgtgatgatgatcaggaggagcaagagtcagatttcgttgatattctgctcgatcgtcaacaggagtacaatctaaccaggcacaatatccatgccatattgatggacatgtttgcagcggggacggacacttcatatatagcccttgaatttgctatgtccgagctcataagaaaaccacatctcatgaccaaactacaagatgaagttaggaagaacacacctacccaaatggtaagtgaagatgacttgaacaatatgccctacctaaaagccgtcgtaaaggagacacttcggttgcatccaccagttccgctcctcctaccgcgcctcttcatggctcagtgcaatgccaatggttatacaatcccagccaacacacgtgtcatcatcaatgtttgggctcttggcagagatgctaaatgttgggagaattcagaagagttcatgccagagaggtttatggatagtggagacactatagataatgttgatttcaagggaaccgactttcagtttctcccatttggagctggacgaaggatttgtcctgggatgaattttgggatggcctctgttgagctcatgctatcaaaccttatgtattgctttgactgggagctcccggttggaatggacaaagatgatgtcgatatgacagatcagttcgcacttacaatggcgcgaaaagagaaactctacctcatcccgagatcacacgttatcaagatcacataa

SEQ ID NO: 32 - protein, 349 aa, Oryza sativa
MRELLGSFTNDVLCRAVCGKSSFRREGRNKLFMELAAGNADQYAGFNLEDYFPSLAKVDLLRRVVSADTKKLKEKWDSVLGDIVSEHEKKSSLRRDDQVQMDDDRDDDQEEQESDFVDILLDRQQEYNLTRHNIHAILMDMFAAGTDTSYIALEFAMSELIRKPHLMTKLQDEVRKNTPTQMVSEDDLNNMPYLKAVVKETLRLHPPVPLLLPRLFMAQCNANGYTIPANTRVIINVWALGRDAKCWENSEEFMPERFMDSGDTIDNVDFKGTDFQFLPFGAGRRICPGMNFGMASVELMLSNLMYCFDWELPVGMDKDDVDMTDQFALTMARKEKLYLIPRSHVIKIT

SEQ ID NO: 33 - DNA, 732 bp, Oryza sativa
atggcgacggcgaggttgctcctagtgctcacggtggtggcggcggcgggcagctgcttctgcagcgcccaggaggcgaagccgccgccgtactgcggcagcgtgaggacggccattgaggcgcacaacatcatcggctggaagacgttcacggcggattgcgccaaatacctcgccgactacctcaccggcgatcgatacccccgcgacgccgacgtggtgatcaacgaggccatcgcctacgccgagagcctcaagctctccggcagcggcaaggagatctgggtgttcgacgtcgacgaaaccgcgctctccacactgccctaccaagccaaccatggctacggagttcagccatatgatcaggcaagcttcatccagtacgtgtccgagggaagcgcaccggcgctgcaggggacgctgcggctctaccaacggctgctccagctcggtgttaagccagtattcctgactgaccgcaccgaggaccaaaggacagtcaccaccaacaacctcctctctcagggttactgcagctgggagaaactgttgttccagccggttgggcttcagaccacaacacaggcgttcaagactgatgagcggcagaagcttgtggacgccggctatgtcatcgtcggcaacatcggcgaccagtggaccgacatcctcggctcgccggagggctgccgtacgtttaagtaccccaaccccatgtactatgtcgcctag

SEQ ID NO: 34 - protein, 243 aa, Oryza sativa
MATARLLLVLTVVAAAGSCFCSAQEAKPPPYCGSVRTAIEAHNIIGWKTFTADCAKYLADYLTGDRYPRDADVVINEAIAYAESLKLSGSGKEIWVFDVDETALSTLPYQANHGYGVQPYDQASFIQYVSEGSAPALQGTLRLYQRLLQLGVKPVFLTDRTEDQRTVTTNNLLSQGYCSWEKLLFQPVGLQTTTQAFKTDERQKLVDAGYVIVGNIGDQWTDILGSPEGCRTFKYPNPMYYVA

SEQ ID NO: 35 - DNA, 1404 bp, Oryza sativa
atgaagacgtacgagatggtggacgacccggccaccgatgccgtcgtctcatggggccccgggaacaacagcttcgttgtgtggaacacccccgagttcgcgcgcgacctcctccccaagtacttcaagcacagcaacttctcctccttcgtcaggcagctcaacacctacggatttaggaaagttgatccagataggtgggagtttgcaaacgaaggttttcttagaggacaaaagcatctactgaagaccatcaacagaaggaaaccaactcatggaaacaaccaagttcagcagcctcagttgccagctgctcctgtacctgcttgcgtagaagtggggaagtttgggatggaagaagagattgagatgctcaaaagggataaaaatgttttaatgcaggaacttgtcaggctgagacaacaacagcagacaacagatcatcagctgcagactttgggcaagcgtcttcaaggaatggagcaacggcaacaacaaatgatgtctttcctggctaaggcaatgcatagtcctggcttcctagcacaatttgtacagcaaaacgaaaacagcagaagaagaatagttgctagtaacaaaaagaggaggctaccaaagcaggatggttcgttggactctgaaagtgcttcattggatggacaaatagtaaaatatcaacctatgatcaatgaagcagccaaagcgatgctaaggaagatcctaaagctagattcttcacatagatttgaatccatgggcaattcagataatttccttcttgagaattatatgccaaatggtcaaggtcttgacagctcttcatcaactcggaattctggtgttacccttgcagaggtcccagctaactcaggtttgccatatgtagctacaagctctggactttcagctatttgttcaacttcgactcctcagattcagtgcccagttgttttggacaacggcatacccaaagaagttccaaacatgagtgcggtgccttctgttccgaaggctgtggctccaggcccaactgatatcaatattctggaattcccagatttgcaagatatagtagctgaagaaaatgttgatattcctggagggggctttgaaatgcctggtcctgagggtgtattctctttgcctgaagaaggtgatgatagtgttcccattgagactgatgagattttgtacaacgatgacacccagaaacttcctgctatcattgattctttctgggaacagttcctggtggctagccctctatctgttgataatgatgaagtcgattcaggtgtactagaccaaaaggaaacacaacaggggaatggatggaccaaagctgaaaacatggctaaccttacagaacagatgggcctcctgtcatcacaccatacaggatga

SEQ ID NO: 36 - protein, 467 aa, Oryza sativa
MKTYEMVDDPATDAVVSWGPGNNSFVVWNTPEFARDLLPKYFKHSNFSSFVRQLNTYGFRKVDPDRWEFANEGFLRGQKHLLKTINRRKPTHGNNQVQQPQLPAAPVPACVEVGKFGMEEEIEMLKRDKNVLMQELVRLRQQQQTTDHQLQTLGKRLQGMEQRQQQMMSFLAKAMHSPGFLAQFVQQNENSRRRIVASNKKRRLPKQDGSLDSESASLDGQIVKYQPMINEAAKAMLRKILKLDSSHRFESMGNSDNFLLENYMPNGQGLDSSSSTRNSGVTLAEVPANSGLPYVATSSGLSAICSTSTPQIQCPVVLDNGIPKEVPNMSAVPSVPKAVAPGPTDINILEFPDLQDIVAEENVDIPGGGFEMPGPEGVFSLPEEGDDSVPIETDEILYNDDTQKLPAIIDSFWEQFLVASPLSVDNDEVDSGVLDQKETQQGNGWTKAENMANLTEQMGLLSSHHTG

SEQ ID NO: 37 - DNA, 957 bp, Oryza sativa
  misc_feature (630)..(630): n = any nucleotide
atgggaggtgcccacggtgtctgctatggcgttgtcggcaacaacctcccgtcgcggagcgaggtcgtgcagctgtacaagtcgaaaggcatcagcgcgatgcgcatctactacccggaccaggaagccctcgccgcgctccgcggcagcggcatcgccgtcatcgtcgacgtcggcgacaagggcgcggtggccaacctcgccaacaacccctccgccgccgccgactgggtccggaacaacgtccaggcctactggccgagcgtcttcatccggtacatcgccgtcggcaacgagctcggccccggcgacatggggaccatcctcccggccatgcagaacttgtacaacgcgctcgtgtccgccggcctctcgaacagcatcaaggtgtcgacggcggtgaagatggacgtgatcaccaactcgttccctccgtcgcacggcgtgttccgccccgaccttcagcggttcattgtgcccatcgcgcagttcctcgccaacaccatgtcgccgctgctcgtcaacgtgtacccctacttcgcctacagggacaacccgcgcgacatcccgctcaactacgccacgttccagccgggcaccacggtgagggacaacgacagcggcctcacntacaccaacctcttcagcgccatggtggacgccgtgtacgccgcgctggagaaggccggcgcgcccggcgtccgcgtcgtcgtgtcggagagcgggtggccgtcggcgggagggttcgcggcgaacgtggagaacgcgaggaatcacaaccagggcgtgatcgacaacgtcaagaacgggacgccgaagcggcccgggcagctggagacgtacgtgttcgccatgttcaacgagaaccagaagcccggggatgagaccgagaggcattttgggctcttcaatcctgacaagacgccggtctacccgattacgtttcctccgaactag

SEQ ID NO: 38 - protein, 318 aa, Oryza sativa
MGGAHGVCYGVVGNNLPSRSEVVQLYKSKGISAMRIYYPDQEALAALRGSGIAVIVDVGDKGAVANLANNPSAAADWVRNNVQAYWPSVFIRYIAVGNELGPGDMGTILPAMQNLYNALVSAGLSNSIKVSTAVKMDVITNSFPPSHGVFRPDLQRFIVPIAQFLANTMSPLLVNVYPYFAYRDNPRDIPLNYATFQPGTTVRDNDSGLTYTNLFSAMVDAVYAALEKAGAPGVRVVVSESGWPSAGGFAANVENARNHNQGVIDNVKNGTPKRPGQLETYVFAMFNENQKPGDETERHFGLFNPDKTPVYPITFPPN

SEQ ID NO: 39 - DNA, 2160 bp, Oryza sativa
atggcggcctgggcatggccgctcgtcttcctcgtctcgtgctgctgttcttggacccagcggcgaatcttggttgctgcgaccactgacgccaatgatgttactgtcctcaatgcgctattcaccagcctcaattcgccggggcagctgcgcggttggcaggtgaatggcggtgacccatgtggcgcctcatggcagggcatcacctgctctggatcatcagtcacagcaattaaattgccgagcttggggctttcggggaatctggcctacaatatgaacaccatggagtccctagttgagcttgacatgagccaaaataatcttgggggtggccaaaatattcaatacaatcttccaaataagaagcttgagaggctcaatcttgctgggaaccagtttgctggaaatgtgccatactcaatttccacaatgcctaaacttaagtatctaaaccttaatcataaccaattacaaggaaatatgacagatgtcttttccaaccttccaagtttatcaacacttgatctctccttaaattctcttactggtgatctcccacaaagtttcacttctctgtcaagcctgaaaactttgtatctgcagaacaaccaatttactggatcaatcaatgtccttgctaatcttcccctggataatttaaatgtgggaaacaaccgttttactggttggattcctaatgagctaaagaaaataaatagtcttcaaaccgatggcaattcttggagcacaggtccggcaccaccaccaccaccattcacagcacctccaccatcacgcaaccgtaaaaaaagcccaggcagacactccaatggcagtggtagctcatcaagttctggtggaaattcagggttacgtgctggagctatagcaggaattatcgtagctctactggtcattggagcagttgtagcattcttcttgataaagagaaaacgcaaaggtacaaggcaagaacatgttgaacagcgacagcctttcaattcatacccttccaatgaagttaaagatgtgaagcctataccagaatccaccaagatagaggtggagcctttgccttcccctgtggccgttagtctaaaaccacctcctaagattgagcgcaaccagtcatttgatgacgatgatgatgacttttcaaacaagcctgttgcaaagaaaagtaattcagcatcagtaaaagcaacagtttattcagttgcagacctacagatggcaacagatagtttcaacatggacaatcttgttggagagggtacttttggacgtgtttacagggcacaattcagtgatggaaaggtactagctgtcaagaaactaaacagtactgtgttgccaagccaatcttcagacgatttctttgacttggtgtcaaacatttcaaagttgcaccatcccaatctcaatgagcttgtgggctattgcatggagcatggacagcacttgctagtttatgatttccacagaaatggttcgctgcatgatatgcttcacctcccagatgaatatagcaaaccactcagctggaattctcgtgttaagattgcgttaggttctgcacgggcactagagtatcttcatgaaatttgttctccttctattatccacaagaacttcaagtcatctaatatcttgctggacaccgagttcaatcctcatgtttctgatgctggacttgccagcagtgttcctgattctgaattccaggcttcagatcagggttctggatatagtgcccctgaagttgacatgactgggcagtataccctcaagagtgatgtttatagctttggagttgtcatgctggagctcttgacaggccgcaaaccatttgacagcgctagactccggacagagcagtcacttgtccggtgggcaacgccccagctgcatgacatcgatgcgttggaccggatggtcgacccagcgctcaagggcctgtaccctgccaaatccctgtcccgtttcgcagacgtcattgcgctgtgtgtccagcctgagccggagttcagaccgccgatgtctgaggtggtgcaagcgctggtccgccttgttcagagggccaacatgactaggagaatgatcgacggcgaagagggttctcgaagaccagatgaccaggaccaggagttcgtgtaa

SEQ ID NO: 40 - protein, 719 aa, Oryza sativa
MAAWAWPLVFLVSCCCSWTQRRILVAATTDANDVTVLNALFTSLNSPGQLRGWQVNGGDPCGASWQGITCSGSSVTAIKLPSLGLSGNLAYNMNTMESLVELDMSQNNLGGGQNIQYNLPNKKLERLNLAGNQFAGNVPYSISTMPKLKYLNLNHNQLQGNMTDVFSNLPSLSTLDLSLNSLTGDLPQSFTSLSSLKTLYLQNNQFTGSINVLANLPLDNLNVGNNRFTGWIPNELKKINSLQTDGNSWSTGPAPPPPPFTAPPPSRNRKKSPGRHSNGSGSSSSSGGNSGLRAGAIAGIIVALLVIGAVVAFFLIKRKRKGTRQEHVEQRQPFNSYPSNEVKDVKPIPESTKIEVEPLPSPVAVSLKPPPKIERNQSFDDDDDDFSNKPVAKKSNSASVKATVYSVADLQMATDSFNMDNLVGEGTFGRVYRAQFSDGKVLAVKKLNSTVLPSQSSDDFFDLVSNISKLHHPNLNELVGYCMEHGQHLLVYDFHRNGSLHDMLHLPDEYSKPLSWNSRVKIALGSARALEYLHEICSPSIIHKNFKSSNILLDTEFNPHVSDAGLASSVPDSEFQASDQGSGYSAPEVDMTGQYTLKSDVYSFGVVMLELLTGRKPFDSARLRTEQSLVRWATPQLHDIDALDRMVDPALKGLYPAKSLSRFADVIALCVQPEPEFRPPMSEVVQALVRLVQRANMTRRMIDGEEGSRRPDDQDQEFV

SEQ ID NO: 41 - DNA, 720 bp, Oryza sativa
atggcagctcccgccatcctccgcctcctccctcttctcctcctcgccgccgccgcgaacgccgccacgttcaccatcaccaacaagtgccagatcaccgtgtgggcggcagccgtgccgtccggcggcgggcagcagctggacccggggcagcagtgggtgatcgacgtgccggccggcacgacgggcgggcgcgtgtgggcgcgcacgggctgcagcttcgacggcagcggcaacgggcggtgccagacgggcgactgcggcggcgtgctgcggtgcgcggcgtacgggcagccgcccaacacgctggcggagttcgcgctgaaccagttcagcaacctcgacttcttcgacatctccctcatcgacggattcaacgtgcccatggacttcctcccccgccggcgacggcgccgggtgcgccaagggcgggccgcggtgcgaggcggacgtggcggggcagtgcccgagcgagctgagggcgcccggcgggtgcaacaacgcgtgcacggtgttcaagcaggaccagtactgctgcaccggctcggcggcgaacaactgcggcccgaccaactactcgcagttcttcaaggggctctgcccggacgcctacagctaccccaaggacgaccagacgagcaccttcacttgcccggccggcaccaactaccaggtcgtcttctgcccatgagggacgatgacttgttagctggcatctga

SEQ ID NO: 42 - protein, 239 aa, Oryza sativa
MAAPAILRLLPLLLLAAAANAATFTITNKCQITVWAAAVPSGGGQQLDPGQQWVIDVPAGTTGGRVWARTGCSFDGSGNGRCQTGDCGGVLRCAAYGQPPNTLAEFALNQFSNLDFFDISLIDGFNVPMDFLPRRRRRRVRQGRAAVRGGRGGAVPERAEGARRVQQRVHGVQAGPVLLHRLGGEQLRPDQLLAVLQGALPGRLQLPQGRPDEHLHLPGRHQLPGRLLPMRDDDLLAGI

SEQ ID NO: 43 - DNA, 669 bp, Oryza sativa
atggctttttccatctccaagaaggctgcagttgctgcactcttctccttccttgttgtcacctgcgtcgccggcgccaggccggggaacttcagcgcctccgacttcaccgccgatcccaactgggaagtcgccagggccacctggtacggcgctcccaccggcgccggccctgacgacgatggcggtgcttgcgggttcaagaacaccaaccagtacccgttctcgtcgatgacctcctgcggcaacgagcctatcttcaaggacgggaagggctgtggctcatgctaccagataagatgcgtcaaccaccctgcctgctccggcaacccggagacggtgatcatcaccgacatgaactactaccccgtttccaagtaccacttcgacctgagcggcacggcgttcggcgccatggccaagccggggcagaacgaccagctccgccacgccggcatcatcgacatccagttcaagagggtgccgtgcaacttccctgggctgaaggtgacgttccacgtggaggaggggtcgaacccggtgtacttcgcggtgctggttgagtacgaggacggcgacggcgacgtggtgcaggtggatctcatggaggccaactccccagtcgtggacgccgatgcgcgagtcgtggggctccatctggaggcttga

SEQ ID NO: 44 - protein, 222 aa, Oryza sativa
MAFSISKKAAVAALFSFLVVTCVAGARPGNFSASDFTADPNWEVARATWYGAPTGAGPDDDGGACGFKNTNQYPFSSMTSCGNEPIFKDGKGCGSCYQIRCVNHPACSGNPETVIITDMNYYPVSKYHFDLSGTAFGAMAKPGQNDQLRHAGIIDIQFKRVPCNFPGLKVTFHVEEGSNPVYFAVLVEYEDGDGDVVQVDLMEANSPVVDADARVVGLHLEA

SEQ ID NO: 45 - DNA, 741 bp, Oryza sativa
atggggcggggcaaggtgcagctgaagcggatcgagaacaagatcaaccggcaggtgaccttctccaagcgcaggtcggggctgctcaagaaggcgaatgagatctccgtgctctgcgacgccgaggtcgcgctcatcatcttctccaccaagggcaagctctacgagtacgccaccgactcatgtatggacaaaatccttgaacgttatgagcgctactcctatgcagaaaaggtccttatttcagctgaatctgacactcagggcaactggtgccacgaatataggaaactgaaggctaaggttgagacaatacagaaatgtcaaaagcacctcatgggagaggatcttgaatctttgaatctcaaagagctgcagcagctggagcagcagctggaaaattcgttgaaacatatcagatccagaaagagccaactaatgctcgagtccattaacgagcttcaacggaaggaaaagtcactgcaggaggagaataaggtcctacagaaagaactggtggagaagcagaaagtccagaagcaacaagtgcaatgggaccagacacaacctcaaacaagttcctcatcatcctccttcatgatgagggaagcccttccaacaactaatatcagtaactaccctgcagcagctggcgaaaggatagaggatgtagcagcagggcagccacagcatgttcgcattgggctgccaccatggatgctgagccacatcaacggctaa

SEQ ID NO: 46 - protein, 246 aa, Oryza sativa
MGRGKVQLKRIENKINRQVTFSKRRSGLLKKANEISVLCDAEVALIIFSTKGKLYEYATDSCMDKILERYERYSYAEKVLISAESDTQGNWCHEYRKLKAKVETIQKCQKHLMGEDLESLNLKELQQLEQQLENSLKHIRSRKSQLMLESINELQRKEKSLQEENKVLQKELVEKQKVQKQQVQWDQTQPQTSSSSSSFMMREALPTTNISNYPAAAGERIEDVAAGQPQHVRIGLPPWMLSHING

SEQ ID NO: 47 - DNA, 282 bp, Oryza sativa
atggagagggttgcatcgagctgtctcagccttctggcacaaaggaggggttactcggtggcggcggccgtggcgaagggagccggccggagggcggacgagaagaaggtggcggcggcggtggccaagcgcacgatggcgaaggccgccgaggagaagacggcgtgggtgccggacccggtgaccgggtactaccggccggccggcggcgcaaaggaggtggacgcggcggagctgcgcgccaagctgctctccaactccaagaggatggctgccaactga

SEQ ID NO: 48 - protein, 93 aa, Oryza sativa
MERVASSCLSLLAQRRGYSVAAAVAKGAGRRADEKKVAAAVAKRTMAKAAEEKTAWVPDPVTGYYRPAGGAKEVDAAELRAKLLSNSKRMAAN

SEQ ID NO: 49 - DNA, 792 bp, Oryza sativa
atggcggctgaactagatggagcaggtgtagccggggggagggttcttgccgcaggtgaggaggagctggagcgcgaggggcaggtagatgttgatgttgaggagcttgagcctgatggtggtgcagaggcacacggcggcctccagctccacgagcccctccagcagcgggcagcacttgttcaccaccgggtcgccgatccccacgtgcaccagcccccccagcaggtccacgcacgccccgatcttcagcgagtccaccgggcacctctgcgtcgccggcggcggcggcgggcacggcgtcgtcgtcggcggcgtcgggtacgtcaccggcggcgtcgggtatgtcaccggcggcgtcgggtaggtgaccggagggccgacgacgaccggaggggtggtgaccggaggtgtggggtaggtgaccggcgggccgacgacgaccgggggggtggtgaccggaggtgtggggtaggtgaccggcggcggacgggtgacggggcccttcggcgggtgggtgacggggaccttgggaggggcgacgagcggcggcgggcgggtgaccggagacgggtaggtggggcccttgggggggcgaggggtagggttcttggggcccttggggtggccgggagagggagaagggtgcgagggcttggggtgcttgggcttgtcgcagtcgcattccgggtcgtactccgcgaggatggaagccacggtggtggagaggaggaggagcagcgtcaggaggaatggccgcagcttggtgctgcccgccatggctgctgctag

SEQ ID NO: 50 - protein, 263 aa, Oryza sativa
MAAELDGAGVAGGRVLAAGEEELEREGQVDVDVEELEPDGGAEAHGGLQLHEPLQQRAALVHHRVADPHVHQPPQQVHARPDLQRVHRAPLRRRRRRRARRRRRRRRVRHRRRRVCHRRRRVGDRRADDDRRGGDRRCGVGDRRADDDRGGGDRRCGVGDRRRTGDGALRRVGDGDLGRGDERRRAGDRRRVGGALGGARGRVLGALGVAGRGRRVRGLGVLGLVAVAFRVVLREDGSHGGGEEEEQRQEEWPQLGAARHGCC

SEQ ID NO: 51 - DNA, 546 bp, Oryza sativa
atgttctacgcgcccgtgctgttcaacacgctcgggttcaagaccgacgcgtcgctctactccgcggtgatcacgggggccgtgaacgtgctgtccacgctggtgtccgtctactcggtggacagggtggggaggcggatgctgctgctggaggccggcgtgcagatgttcctgtcgcaggtggccatcgccgtcgtgctggggatcaaggtgacggaccggtcggacaacctcggccacgggtgggcgatcatggtggtggtgatggtgtgcacgttcgtgtcctccttcgcgtggtcgtggggcccgctcgggttggctcatcccccagcgagacgttcccgctggagacgcggtcggcggggcagagcgtcaccgtgtgcgtcaacctgctcttcaccttcgtcatcgcgcaggcgttcctctccatgctctgccacctcaagtacgccatcttcgccttcttctccgcgtgggtcgtcgtcatgtcgctcttcgtgctcttcttcctgcccgagaccaagaacatccccatcgaggagatga

SEQ ID NO: 52 - protein, 181 aa, Oryza sativa
MFYAPVLFNTLGFKTDASLYSAVITGAVNVLSTLVSVYSVDRVGRRMLLLEAGVQMFLSQVAIAVVLGIKVTDRSDNLGHGWAIMVVVMVCTFVSSFAWSWGPLGLAHPPARRSRWRRGRRGRASPCASTCSSPSSSRRRSSPCSATSSTPSSPSSPRGSSSCRSSCSSSCPRPRTSPSRR

SEQ ID NO: 53 - DNA, 1251 bp, Oryza sativa
atgcagcaagaacaggcagacggccgggagatcgtcatcgccggcgccggcctcgccgggctcgcagtggccctcggactgcacaggaaaggactgaggagcgtggtgctggagtcgtcgccgacgctgcggacgtccgggttggcgttcatcacatggacgaacgccttccgcgcgcttgatgcccttggggtaggcgacaagatgaggagccagcaccagcagatccagaggttgaatgtcatgtcttcagctactggagaaatagtgcaagaaattgatctgagggcgcaaggcaaacggggaacccatgaggcacgctgcgtgagccgcaccgcgctgctactggcgttggaggaagagctcccaagaggcaccatccgctactcctccaagatcgtctcgatcgaggaagacggcaacgccaagatcctccatctgtctgacggatcgactctcagagcaaaggtgctgatcgggtgcgacgggatcaactcggtggtggcgagatggctggggctcgcgaagccgtcggactcggggcacacggccacgcgcggacgcgccaagtacccggacggccatggcttcgagcccaggtttctgcagttggtcggccagggattccgtgcaggcatggtgccctgcaacgacaccgacgtctactggttcttcacgtggtctccttccccagatgataaggatgtcgacaagagttcagccgcgacgaagcagttcgtgctgacaaagctccggagcacgaacgtgccaccacaggtgctcgaggcggtcgagcggagcgagatgaacgacgtgctcgcggcgccgctgcggttccgatcgccgctgtcgctcccgttcgcgagcatcagcaaggggaacgtgtgcgtcgccggcgacgcgctccacccgacgacgccggacctggcgcagggcgcgtgcacggcgctggaggacgccgtcgtcctggcgaggtgcctcggcgaggcgctgctgctccgtaccggcgactgcgccgccgaggagagtcaccgggtcgtcgaggccgcgctgcgccggtacgcggacgcccggcggtggaggagtgcgcagctgaccggtgcgtcgtacgcggtggggttcgtgcagcagagcgaccaccccgccgtgggcttcctgcgtgacaagctgttgtccggggtgctcgccaagacgctgctcatgatgcccgactacgattgcggcacgctctcgagttccggtgcttgttga

SEQ ID NO: 54 - protein, 416 aa, Oryza sativa
MQQEQADGREIVIAGAGLAGLAVALGLHRKGLRSVVLESSPTLRTSGLAFITWTNAFRALDALGVGDKMRSQHQQIQRLNVMSSATGEIVQEIDLRAQGKRGTHEARCVSRTALLLALEEELPRGTIRYSSKIVSIEEDGNAKILHLSDGSTLRAKVLIGCDGINSVVARWLGLAKPSDSGHTATRGRAKYPDGHGFEPRFLQLVGQGFRAGMVPCNDTDVYWFFTWSPSPDDKDVDKSSAATKQFVLTKLRSTNVPPQVLEAVERSEMNDVLAAPLRFRSPLSLPFASISKGNVCVAGDALHPTTPDLAQGACTALEDAVVLARCLGEALLLRTGDCAAEESHRVVEAALRRYADARRWRSAQLTGASYAVGFVQQSDHPAVGFLRDKLLSGVLAKTLLMMPDYDCGTLSSSGAC

SEQ ID NO: 55 - DNA, 960 bp, Oryza sativa
atggctgatgaaatccagcatctgaccagggccttctcagggctcggtggcctcggcgtggacgagccggcgatggtgtcggcgctggccaagtggcgcaggcagccggagaagctgtccgggttcaggaagagcttcaatggcttcttcaaggatcatggcggcgtcatcgagaagtgcgaggaggagtacatgctccacctcgccgccgagttctcgcggttcaagaacctgatggtgatgtgggcgatgcacccgtgggagcgcgacgcgcggctggcgcaccacgtgctccaccaggcgcacccggcggccatcgtcgtggagatcgcttgcacccggacggcggaggagctcctcggcgctcgcaaggcgtaccaggcgctgttccaccactccctcgaggaggacgtcgcctaccgcgccagggacaagccctactgcggcctgctggtcgggctggtgagcgcgtaccggtacgagggcccgagggtgagcgaggagacggcgcgcgcggaggcgaaggcgctcgtcgccgcggtgaagagcgccggccacgcggcggcgaagctggtggagaacgacgacgtcgtcaggatcctcaccacccggagcaagccgcacctcgtcgagaccttcaagcactacaaggaaatccatggccgccacatcgaagaggatcttgggcacgaggagacactgagggaggcggcgctgtgcctggcgacgccggcgaggtacttcagcgaggtggtggcggcggcggtgagcgacggcgccgaccaccacgcgaaggaggcgctgacgcgggtggcggtgacgcgggcggacgtggacatggacgccatccgcgcggcctaccacgagcagttcggcgggaggctggaggacgccgtcgccgggaaggcgcacggctactacagagacgcgctcctctcgctcgtcgccggcggcaagtga

SEQ ID NO: 56 - protein, 319 aa, Oryza sativa
MADEIQHLTRAFSGLGGLGVDEPAMVSALAKWRRQPEKLSGFRKSFNGFFKDHGGVIEKCEEEYMLHLAAEFSRFKNLMVMWAMHPWERDARLAHHVLHQAHPAAIVVEIACTRTAEELLGARKAYQALFHHSLEEDVAYRARDKPYCGLLVGLVSAYRYEGPRVSEETARAEAKALVAAVKSAGHAAAKLVENDDVVRILTTRSKPHLVETFKHYKEIHGRHIEEDLGHEETLREAALCLATPARYFSEVVAAAVSDGADHHAKEALTRVAVTRADVDMDAIRAAYHEQFGGRLEDAVAGKAHGYYRDALLSLVAGGK

SEQ ID NO: 57 - DNA, 696 bp, Oryza sativa
atgctccgcaagcacacctacttcgacgagctcgcgcagagcaagcgcaccttcgccgcctccacgccgtcggccgcgaccaccaccgcctccctctccaacggccacctctcgtcgccccgctcccccttcgcgcccgccgcggcgcgcgaccacctgttcgacaagacggtcaccccgagcgacgtgggcaagctgaacaggctcgtcataccgaagcagcacgccgagaagcacttcccgctacagctcccgtccgccggcggcgagagcaagggtgtcctcctcaacttcgaggacgccgccggcaaggtgtggcggttccggtactcgtactggaacagcagccagagctacgtgctaaccaagggctggagccgcttcgtcaaggagaagggtctccacgccggcgacgtcgtcggcttctaccgctccgccgccagtgccggcgacgacggcaagctcttcatcgactgcaagttagtacggtcgaccggcgccgccctcgcgtcgcccgctgatcagccagcgccgtcgccggtgaaggccgtcaggctcttcggcgtggacctgctcacggcgccggcgccggtcgaacagatggccgggtgcaagagagccagggacttggcggcgacgacgcctccacaagcggcggcgttcaagaagcaatgcatagagctggcactagtatag

SEQ ID NO: 58 - protein, 231 aa, Oryza sativa
MLRKHTYFDELAQSKRTFAASTPSAATTTASLSNGHLSSPRSPFAPAAARDHLFDKTVTPSDVGKLNRLVIPKQHAEKHFPLQLPSAGGESKGVLLNFEDAAGKVWRFRYSYWNSSQSYVLTKGWSRFVKEKGLHAGDVVGFYRSAASAGDDGKLFIDCKLVRSTGAALASPADQPAPSPVKAVRLFGVDLLTAPAPVEQMAGCKRARDLAATTPPQAAAFKKQCIELALV

SEQ ID NO: 59 - DNA, 1020 bp, Oryza sativa
atggcgacttccatgggttgcctgttgatgctctgcttggtttctcccctcctcctcgccacctctgtccacggcaacccgtggtatgggtatgggtatggcttgttcccgcagttctacgaccactcgtgccccaaggcgaaggagatcgtgcagtccatcgtagcacaggcggtggccagggagaccaggatggcggcatccttggtcaggctgcattttcatgactgctttgtcaaggggtgtgacgcgtctgtgctcctggacaacagcaccaccatcatcagtgagaaggggtcaaaccctaacatgaactccctcaggggtttcgaggtcgtcgacgagatcaaggccgccctcgaagcagcttgccccggcaccgtctcctgcgccgacatactcgccctcgctgcacgcgattccactgtcctcgttggtggcccgtactgggatgtgccacttggccggagggactcactgggtgccagcatccagggctccaacaacgacatcccagctcccaacaacaccctccccaccatcatcaccaagttcaagcgccagggccttaacatcgtcgacgtcgtagccctctcaggtggccacaccattggcatgtctcggtgcaccagcttccgtcagaggctctacaatcagagcggcaatggcatggctgactacacactggatgtgtcctacgcggcacagctgaggcagggatgcccccgttctggtggtgacaacaacctcttcccgctagactttgtcagccccgcaaagttcgacaacttctacttcaagaacatcctgtctggcaagggccttctcagctctgatcaggtcctgcttaccaagagcgctgaaacagcggcgctcgtgaaggcgtatgctgatgatgtcaacctcttcttcaagcacttcgcacagtcaatggtgaatatgggcaacatctcgcctctgactggatcacagggggagatcaggaagaactgcaggaggctcaacaactactaccactga

SEQ ID NO: 60 - protein, 339 aa, Oryza sativa
MATSMGCLLMLCLVSPLLLATSVHGNPWYGYGYGLFPQFYDHSCPKAKEIVQSIVAQAVARETRMAASLVRLHFHDCFVKGCDASVLLDNSTTIISEKGSNPNMNSLRGFEVVDEIKAALEAACPGTVSCADILALAARDSTVLVGGPYWDVPLGRRDSLGASIQGSNNDIPAPNNTLPTIITKFKRQGLNIVDVVALSGGHTIGMSRCTSFRQRLYNQSGNGMADYTLDVSYAAQLRQGCPRSGGDNNLFPLDFVSPAKFDNFYFKNILSGKGLLSSDQVLLTKSAETAALVKAYADDVNLFFKHFAQSMVNMGNISPLTGSQGEIRKNCRRLNNYYH

SEQ ID NO: 61 - DNA, 993 bp, Oryza sativa
atgatgaggcgcagcttggtgattgtgatggtggcctgcagctgcgccacagccatagccagaggaggaggaggaggaggtctgaagctcaacttctactcggagtcggagaggtgcccgagggcggaggaggtggtgagggaggaggtgcggaggctgtacgaggagcacggcaacacggcggtgtcgtggttgagggcactcttccacgactgcatggtctactcctgcgacgcctccctgctgctccacaccaccaccaccacaggcgtctccgagcagtcctcccaccgcagcttcggcatgcgcaacttcaagtacatcaccgccatcaaggccgccgtcgagcgtgagtgccctgccaccgtctcctgcgccgacatcctcgccctggccgcccgcgacggcgtggccatgctgggtgggccctcggtggccatgcggacggagcggcgcgacagcagggagagctactacggcgtggtggagcagtacatccccaaccacaacgacagcgtgtccaccgtgctgtcgaggttcgctgccatcggggtggacacggagggagcggtggcgctgtgtggcgcgcactcggtggggcgcgtccattgcttcaacctggtggggaggctgtacccgcaggtgaacggcagcatggacgccggcgtacggggagtacctgcgggggaggtgcccgacggctgcggcgacggaggacacgagagaggtggtgtacgcgcgcaacgaccgcgtcacgcccatgctcatcgacaacatgtactaccgcaacctgctcgccgggcgggggctcctcctggtggaccagcagctggcctccgacgcccgcacggcgccctacgtccgccggatggccgccgacaacgactacttccaccagcgcttcgccgcagcgcttctcaccatgtccgagaacgcgccgctcaccggcgcacagggggaggtcagaaaagactgcaggttcgtcaactctag

SEQ ID NO: 62 - protein, 330 aa, Oryza sativa
MMRRSLVIVMVACSCATAIARGGGGGGLKLNFYSESERCPRAEEVVREEVRRLYEEHGNTAVSWLRALFHDCMVYSCDASLLLHTTTTTGVSEQSSHRSFGMRNFKYITAIKAAVERECPATVSCADILALAARDGVAMLGGPSVAMRTERRDSRESYYGVVEQYIPNHNDSVSTVLSRFAAIGVDTEGAVALCGAHSVGRVHCFNLVGRLYPQVNGSMDAGVRGVPAGEVPDGCGDGGHERGGVRAQRPRHAHAHRQHVLPQPARRAGAPPGGPAAGLRRPHGALRPPDGRRQRLLPPALRRSASHHVRERAAHRRTGGGQKRLQVRQL

SEQ ID NO: 63 - DNA, 801 bp, Oryza sativa
atgaagaagaaggtggagcgctcgctcgccgacggccgcatcacccagatcgtctacaagggcgcacacaaccaccccaagccgctctccacccgccgcaacgcctcctcctgcgccaccgccgccgcctgcgccgacgacctcgcggcgcccggcgcgggcgcggaccagtactccgccgcgacgcccgagaactcctccgtcacgttcggcgacgacgaggccgacaacgcatcgcaccgcagcgagggcgacgagcccgaagccaagcgctggaaggaggatgctgacaacgagggcagctccggcggcatgggcggcggcgccggcggcaagccggtgcgcgagccgaggcttgtggtgcagacgctgagcgacatcgacatcctcgacgacggcttccggtggaggaagtacggccagaaggtcgtcaagggcaaccccaacccaaggagctactacaagtgcacgacggtgggctgcccggtgcggaagcacgtggagcgggcgtcgcacgacacgcgcgccgtgatcaccacctacgagggcaagcacaaccacgacgtcccggtcggccgcggcggcggcggcggacgcgccccggcgccggcgccgccgacgtcgggggcgatccggccgtcggccgtcgccgccgcccagcaggggccctacaccctcgagatgctccccaaccccgccggcctctacggcggctacggcgccggcgccggcggcgccgcgttcccgcgcaccaaggacgagcggcgggacgacctgttcgtcgagtcgctcctctgctag

SEQ ID NO: 64 - protein, 266 aa, Oryza sativa
MKKKVERSLADGRITQIVYKGAHNHPKPLSTRRNASSCATAAACADDLAAPGAGADQYSAATPENSSVTFGDDEADNASHRSEGDEPEAKRWKEDADNEGSSGGMGGGAGGKPVREPRLVVQTLSDIDILDDGFRWRKYGQKVVKGNPNPRSYYKCTTVGCPVRKHVERASHDTRAVITTYEGKHNHDVPVGRGGGGGRAPAPAPPTSGAIRPSAVAAAQQGPYTLEMLPNPAGLYGGYGAGAGGAAFPRTKDERRDDLFVESLLC

SEQ ID NO: 65 - DNA, 1137 bp, Oryza sativa
atgatgatgatgggggaaggagtcagcagcgtcccgccgtggtctcacctccccgtgagcggagtcgatgtactcggcggcggtggtggcggtggggatgagatgacgccgtacgtgatcgccgcgctgcgggattacctgccggcgaatgatgtcggggtgggggctgacgaggaggaggaggccgcggcgatggccgcggcggtggacgcgtacgcgtgcgacgagttccggatgtacgagttcaaggtgcggcggtgcgcgcgcgggcggagccatgactggaccgagtgccccttcgcgcacccgggggagaaggcgcgccgccgcgatccgcgcaagtaccactactccggcaccgcgtgcccggacttccgcaagggcgggtgcaagcgcggcgacgcctgcgagtacgcccacggcgtgtttgagtgttggctccacccggcgcgctaccgcacccagccgtgcaaggacggcaccgcctgccgccgccgcgtctgcttcttcgcccacaccccggaccagctccgcgtcctcccggcgcagcagtccagccccaggagcgtggcgtcctcgccgctggccgagtcctacgacggctcgccgctgcgccgccaggcgttcgagagctacctcaccaagaccatcatgtcctcgtccccgaccagcaccctcatgtctccgcccaagtcgcccccgtcggagtccccgccattgtcgcccgacggtgccgcggccatccgtcgcggatcttggcccggcgtcggctcgccggtgaacgacgtcctggcctcgttccgccagctccgcctcaacaaggtgaagtcgtcgccgtccggcgggtggagctacccttcgtcgtccgccgtctacggggtctcccaaggccgccaccggcctctacagcctccccaccactccactggcttccacggcaacggtgaccaccgcctccagcttcatgcccaacctggagccactggacctcgggctcatcggcgacgaggagccggtccagagggtggagtccggaagagccctccgggagaaggtgttcgagcgactgagccgggatggtgccatctccggcgacgccacagccttcgccaccgccggtgttggcctcgacgttga

SEQ ID NO: 66 - protein, 378 aa, Oryza sativa
MMMMGEGVSSVPPWSHLPVSGVDVLGGGGGGGDEMTPYVIAALRDYLPANDVGVGADEEEEAAAMAAAVDAYACDEFRMYEFKVRRCARGRSHDWTECPFAHPGEKARRRDPRKYHYSGTACPDFRKGGCKRGDACEYAHGVFECWLHPARYRTQPCKDGTACRRRVCFFAHTPDQLRVLPAQQSSPRSVASSPLAESYDGSPLRRQAFESYLTKTIMSSSPTSTLMSPPKSPPSESPPLSPDGAAAIRRGSWPGVGSPVNDVLASFRQLRLNKVKSSPSGGWSYPSSSAVYGVSQGRHRPLQPPHHSTGFHGNGDHRLQLHAQPGATGPRAHRRRGAGPEGGVRKSPPGEGVRATEPGWCHLRRRHSLRHRRCWPRR

SEQ ID NO: 67 - DNA, 972 bp, Oryza sativa
atgagagcgctcgccgtggtcgtggtggccacggcctttgcggtggtggccgtgcgcggcgagcagtgcggcagccaggccggcggcgcgctctgccccaactgcctctgctgcagccagtacggctggtgcggatccacctccgcctactgcggctccggctgccagagccagtgctccggcagctgcggcggcggcggcccgaccccgccctccggcggtggcggcagcggcgtcgcctccatcgtgtcgcgctcgctcttcgaccagatgcttctccaccgcaacgacgcggcgtgcccggccaagaacttctacacctacgacgccttcgtcgccgccgccaacgccttcccgagcttcgccacaaccggcgacgccgccacccgcaagcgcgaggtcgccgcgttcctggcgcagacgtcgcacgagaccacgggcgggtgggcgacggcgcccgatggcccctactcgtggggctactgcttcaaggaggagaacaacggcaacgttgggtccgactactgtgtccagagctcgcagtggccgtgcgccgccggcaagaagtactacggccggggacccatccagatctcctacaactacaactacggcccggcggggcaggccatcggctccaacctgctgagcaacccggacctggtggcgtcggacgccaccgtctccttcaagacggcgttctggttctggatgacgccgcagtcgcccaagccgtcgtgccacgcggtgatgacagggcagtggacgcccaacggcaacgaccaggcggcggggcgcgtgccgggctacggcgtggtgaccaacatcatcaacggcggcgtggagtgcggccacggcgcggacagcagagtcgccgaccggattgggttctacaagcgctactgcgacatgttgggcgtcagctacggcgccaacttggactgctacaaccagaggcctttcaactcctaa

SEQ ID NO: 68 - protein, 323 aa, Oryza sativa
MRALAVVVVATAFAVVAVRGEQCGSQAGGALCPNCLCCSQYGWCGSTSAYCGSGCQSQCSGSCGGGGPTPPSGGGGSGVASIVSRSLFDQMLLHRNDAACPAKNFYTYDAFVAAANAFPSFATTGDAATRKREVAAFLAQTSHETTGGWATAPDGPYSWGYCFKEENNGNVGSDYCVQSSQWPCAAGKKYYGRGPIQISYNYNYGPAGQAIGSNLLSNPDLVASDATVSFKTAFWFWMTPQSPKPSCHAVMTGQWTPNGNDQAAGRVPGYGVVTNIINGGVECGHGADSRVADRIGFYKRYCDMLGVSYGANLDCYNQRPFNS

SEQ ID NO: 69 - DNA, 873 bp, Oryza sativa
atggcgaagcatctcgcgctgtccgtggccgccgcggtggccgtgtcgtggctggcggcgtcgtcggcggcggcggcggggttctacgagaagttcgacgtggtgggcgccggcgaccacgtgagggtggtgagcgacgacgggaagacgcagcaggtggcgctgacgctggaccggagctccgggtccgggttcacctccaaggacacctacctgtttggcgagttcagcgtccagatgaagctcgtcggcggcaactccgccggcaccgtcacctccttctacctctcctccggcgagggcgacggccacgacgagatcgacatcgagttcatgggcaacctcagcggcaacccctacgtcatgaacaccaacgtctgggctaatggcgacggcaagaaggagcaccagttctacctctggttcgaccccaccgccgacttccacacctacaagatcatctggaatccccaaaacatcatattccaggtggacgacgtgccggtgaggacgttcaagaagtacgacgacctggcgtacccgcagagcaagccgatgaggctgcacgcgacgctgtgggacggcagctactgggcgacgaggcacggcgacgtcaagatcgactggagcggcgcgccgttcgtggtgtcgtaccgcgggtacagcaccaacgcgtgcgtcaacaacaatcccgccggcgggtggtcgtcgtcgtggtgccccgagggcacgtcggcgtggatccaccgcgagctcgacggcgccgagctcggcaccgtcgcgtgggccgagcgcaactacatgtcctacaactactgcgccgacggctggcgcttcccccagggcttccccgccgagtgctaccgcaagtga

SEQ ID NO: 70 - protein, 290 aa, Oryza sativa
MAKHLALSVAAAVAVSWLAASSAAAAGFYEKFDVVGAGDHVRVVSDDGKTQQVALTLDRSSGSGFTSKDTYLFGEFSVQMKLVGGNSAGTVTSFYLSSGEGDGHDEIDIEFMGNLSGNPYVMNTNVWANGDGKKEHQFYLWFDPTADFHTYKIIWNPQNIIFQVDDVPVRTFKKYDDLAYPQSKPMRLHATLWDGSYWATRHGDVKIDWSGAPFVVSYRGYSTNACVNNNPAGGWSSSWCPEGTSAWIHRELDGAELGTVAWAERNYMSYNYCADGWRFPQGFPAECYRK

SEQ ID NO: 71 - DNA, 909 bp, Oryza sativa
atgtacgtacacaccaaacgttttattcgttattactttgtttattattcagtcctgatcgatgagccgcgcagcatgtgtgcatgtaactcaacagtaaaggttgccacccgggtcaacgccgaattggcggcagtagtctttgtagtagtttacccttgcgttgacggcgccggggttcttgccgttgcactcgagcgcaccgttgatggcccggatggtggcgccgaacccctgcaacatcacctggtgcacgttgttcatccagaaccagagcgccgtcttgaaggagatcgtcgggtcctgcgccaccctgtccgggtccctcagcccgtcgaacccgatgttctgccccgcaggcccgtagttgtagttccacgagatctgcagcggcccgcgcccgtagtacttcttccccggctggcacggccactgcttgttgttcttgtcgcagtagtccatgctcgccccgtttatctcgttgatgtagcacatatgtccggtctcatgagtgacgtgggcaaagaaggcagcgatctcacgcttggagtcatcgttggtgcggtccctggcgaagcccgagtaggagtgggcagcgttaagaaacgactgtcgtgtgtaaaagttcttgccggcgcaaccgttcggggcctggttcttgatcccattgaagaacgcctcggtgaccacgctctctacagacacgccgctgcctccgcctccgcctccaccacctccgcctcctcctcctccaccgccgccgccgccgtagcacgggccagagcggcacccatctccgcagtagtccttgcccgtgccgcagtacccccatttgctgcagcacatgttcgactggcagccgcagttctgcgcgctcgcctggccggtggcggagaggaggagcgctag

SEQ ID NO: 72 - protein, 302 aa, Oryza sativa
MYVHTKRFIRYYFVYYSVLIDEPRSMCACNSTVKVATRVNAELAAVVFVVVYPCVDGAGVLAVALERTVDGPDGGAEPLQHHLVHVVHPEPERRLEGDRRVLRHPVRVPQPVEPDVLPRRPVVVVPRDLQRPAPVVLLPRLARPLLVVLVAVVHARPVYLVDVAHMSGLMSDVGKEGSDLTLGVIVGAVPGEARVGVGSVKKRLSCVKVLAGATVRGLVLDPIEERLGDHALYRHAAASASASTTSASSSSTAAAAVARARAAPISAVVLARAAVPPFAAAHVRLAAAVLRARLAGGGEEER

SEQ ID NO: 73 - DNA, 1380 bp, Oryza sativa
atgcagagtaaactctacttagcaatggcggctgatcaccttgtcgtggccatgcttctcctgctggctttgtcgccgccggccgttgctgacgacacggcggtgctcggccggaaaggcggcgtcgtggaagggcaggcggcggggccggggaggtacgccgtgatattggacgccggcagcaccggcacacgggtgcacgtcttcaggttcgacaacaagctggacctcctcaaggtcggcgacaacatcgagctcttcgctaaggtggatcctgggctgagctcctacgctggacgtcctcaggatgccgcaaactccatattgcctctgcttgacaaggccaacaccgttgttcctgccagacttatgaacaaaactccccttaaacttggggcaactgccggactcagacttattggagatgaaaaggcgaaccagattcttgaagcggttagggatgtagtccacaccaagagcaaatatcagtataacccgaactggatcaacgttcttgagggatcccaggaagggtcatacatatgggttgctctgaattatctcctggataaattgggaggagactactctaaaaccgtaggggtggttgatcttggaggtggatccgtacaaatggcatacgccatctcatcaaacaccgctgctaccgctccaaagggtgcccgaaggaaagatccctatgttgtgaagggagtatctccaggggaaaagatatacatttatgtgcacagctatttgcactatggcgggtttgcttctcgcgcgcacatctttagaagaaaggatggaccatttagcaactgcatgctgcgcggatcagtgggtaacttcacttacaacggcaagcagtacgacgcaacggcccgcccccaaggtgcagactaccccaagtgcagagaagaagtagtgaagttactgaaggtgaatgcgccctgcgaaaccaagaactgcagcttcaatggcgtctggaacggtggtggcggagcagggcaggatgacctctacgttgcgtccgccttctactacatagcctcccatgttgggttcatcaacagcgatgcacccagtgcgaagtcaacccctgcaacgtttaaggctgttgcagaaaaggtttgtaaactgagtgtcaaagaagcaaaagtagaataccccaacgttcgtgatcatgcctacttatgcatggatcttatctacgaatactccttgctcgttgacggcttcggtctacatccaagtaaggagataacgctggtagacaaggtgaagcatggggagtactacattgacgcggcttggccattgggtacagctattgaagctgtgtcacccaaaaaacggcttcgagaaatatacaaatga

SEQ ID NO: 74 - protein, 459 aa, Oryza sativa
MQSKLYLAMAADHLVVAMLLLLALSPPAVADDTAVLGRKGGVVEGQAAGPGRYAVILDAGSTGTRVHVFRFDNKLDLLKVGDNIELFAKVDPGLSSYAGRPQDAANSILPLLDKANTVVPARLMNKTPLKLGATAGLRLIGDEKANQILEAVRDVVHTKSKYQYNPNWINVLEGSQEGSYIWVALNYLLDKLGGDYSKTVGVVDLGGGSVQMAYAISSNTAATAPKGARRKDPYVVKGVSPGEKIYIYVHSYLHYGGFASRAHIFRRKDGPFSNCMLRGSVGNFTYNGKQYDATARPQGADYPKCREEVVKLLKVNAPCETKNCSFNGVWNGGGGAGQDDLYVASAFYYIASHVGFINSDAPSAKSTPATFKAVAEKVCKLSVKEAKVEYPNVRDHAYLCMDLIYEYSLLVDGFGLHPSKEITLVDKVKHGEYYIDAAWPLGTAIEAVSPKKRLREIYK

SEQ ID NO: 75 - DNA, 801 bp, Oryza sativa
atggcggagcccaacccgcaagtggagagggaggtggaggtggaggaggtgaggaggccgaagctgaggtacttggagttcgtgcaggtggcggcagcgcaggcgacgatctgcctcgcggggctctacgcgcttgccaaggaccacgccggcccgctccgccccggcgtcgacgccgtcgagtccgccgtcaagggcgtcgtcggccccgtctacggccgcttccatggcgtccccctcgacgtcctcgccttcgtcgaccgcaaggtggatgacacggtgcaagagctggaccgacacctcccgccgacgctgaaggccgcctccgccaaggcttgcgcggtggcccgcggcgtgccggacgtggcgagggagctcccccgcggaagtgcagcagtcgggcgtcaccggcgccgcgcgcgtcgcgtacgccaaggtcgagcccgtggccaagggcgtgtacggcaggatccagccggcggccaaggacctctacgtgcgctacgagccggcggcggagcacctcgccgtctccacctggcgctcgctcaacaacctgccgctgttcccgcaggtggcgcagatcgccgtgcccaccgccgcctactgggccgagaagtacaacaaggtgatcgccgccgcggccgacaagggttacaccggagcacagtacctccccgccatccccaccgagcgcatcgccaaggttttcggcgagttatcgccggaggcccagccgtcgaagagcgagtcggcgaagacccagtaggtgaggtccccgcgcctgaaggtgagaggtag

SEQ ID NO: 76 - protein, 266 aa, Oryza sativa
MAEPNPQVEREVEVEEVRRPKLRYLEFVQVAAAQATICLAGLYALAKDHAGPLRPGVDAVESAVKGVVGPVYGRFHGVPLDVLAFVDRKVDDTVQELDRHLPPTLKAASAKACAVARGVPDVARELPRGSAAVGRHRRRARRVRQGRARGQGRVRQDPAGGQGPLRALRAGGGAPRRLHLALAQQPAAVPAGGADRRAHRRLLGREVQQGDRRRGRQGLHRSTVPPRHPHRAHRQGFRRVIAGGPAVEERVGEDPVGEVPAPEGER

SEQ ID NO: 77 - DNA, 978 bp, Oryza sativa
atgcgcaacggccgccgcgacgactcctaccagaagtggcgctggcagccgaccgactgcgacctgccccggttcgacgcgaggctgctgctggagcggctgcgcaacaagcggctgatgttcgtgggggattcgctgaaccgcaaccagtgggagtcgatggtgtgcctggtccagtccgtgatccccaagggcaagaagacgctcaccaagttcgtcaacggcggcaacagcaacatcttctacgcacacgagtacaacgcgacggtggagttctactgggcgccgttcctggtggagtcgaactcggacaacccgcaggtgcacagcgtccccgaccgcgtcatccagtggcactccatcgccaagcacgcgcacaactggctcggcgtcgactacctcatcttcaacacctacatctggtggctcaacaccctcgacatgaaagtcctgaaggggtcgttcgaccagggtgcgacggagtacgtggaggtggaccggcccgtggcgtacaaggaggtgctcaagacgtgggcgaagtgggtcgaccgcaacattgaccccaaccggacgaccgtcttcttcatgagcatgtctcccaaccacatcacgccggaggcgtggggaaactacggagggatcaagtgcgcgatggagacgctgccgatcacgaaccggacgacgtcgctggacgtgggcacggactggaggctgtacgccggggcgcaggaggtgctccagacgttccgccgggtgccggtgcacctcgtcgacatcacggcgctgtcggagctccgcaaggatgcgcacacgtcggtgcacacgctccggcaggggaagctgctcacccccgagcagcagtccgaccccaagacgtacgccgactgcatccactggtgcctcccgggcctccccgacacctggaaccagttcctctacgcccgcatcgcctccgccccatggtcatccgaccagtag

SEQ ID NO: 78 - protein, 325 aa, Oryza sativa
MRNGRRDDSYQKWRWQPTDCDLPRFDARLLLERLRNKRLMFVGDSLNRNQWESMVCLVQSVIPKGKKTLTKFVNGGNSNIFYAHEYNATVEFYWAPFLVESNSDNPQVHSVPDRVIQWHSIAKHAHNWLGVDYLIFNTYIWWLNTLDMKVLKGSFDQGATEYVEVDRPVAYKEVLKTWAKWVDRNIDPNRTTVFFMSMSPNHITPEAWGNYGGIKCAMETLPITNRTTSLDVGTDWRLYAGAQEVLQTFRRVPVHLVDITALSELRKDAHTSVHTLRQGKLLTPEQQSDPKTYADCIHWCLPGLPDTWNQFLYARIASAPWSSDQ

SEQ ID NO: 79 - DNA, 918 bp, Oryza sativa
atgtggtggtccaagttccattcgaacaagctcaagtacacgcgtgggtacctgatcgaggtgatgcactcggacacggtggtgatatcgaacgtgacgctggtgaactcgccggcgtggaacatccacccggtgtacagcagcaacatcgtggtgcagggggtgacgatcctggcaccgacgcactcgcccaacaccgacggcatcaacccggactcgtgctcccacgtccgcatcgaggactgctacatcgtgtccggcgacgactgcgtggcgatcaagtccgggtgggacgagtacgggatcgcgtacgggatgcccagccagcacatcgtggtgcggaggctgacgtgcgtgtcgccgacgagcgcggtgatcgcgctgggcagcgagatgtcgggcgggatcagcgacgtgcgggcggaggacataacggcggtgaactcggagtcggcggtgcggatcaagacggcggtggggcgtggggcgtacgtgcgcgacgtgttcgtccgggggatgtcgctggacaccatgaagtgggtgttctggatgacggggaactacaagtcccacccggacgacgggtacgaccccaacgccatccccgtcgtggacaacatcagctaccaggacgtggtggccacgggggtgtacaaggaggccgccaggctggagggcatccagggcgcccccttccgcggcatctgcatcgccaacgtcaccgccacgctctccaagtcgcgcaagtacccgtggacctgcaccgacatcgagggggtgtccaccggcgtcacgccggcgccgtgccagccgctgcagggggcgcacgatggcgcctgcccgttccccacggacacgctgcccatcgaccagctcgtcatgcagcagtgcgcctactccgtcccggcctccatctag

SEQ ID NO: 80 - protein, 305 aa, Oryza sativa
MWWSKFHSNKLKYTRGYLIEVMHSDTVVISNVTLVNSPAWNIHPVYSSNIVVQGVTILAPTHSPNTDGINPDSCSHVRIEDCYIVSGDDCVAIKSGWDEYGIAYGMPSQHIVVRRLTCVSPTSAVIALGSEMSGGISDVRAEDITAVNSESAVRIKTAVGRGAYVRDVFVRGMSLDTMKWVFWMTGNYKSHPDDGYDPNAIPVVDNISYQDVVATGVYKEAARLEGIQGAPFRGICIANVTATLSKSRKYPWTCTDIEGVSTGVTPAPCQPLQGAHDGACPFPTDTLPIDQLVMQQCAYSVPASI

SEQ ID NO: 81 - DNA, 501 bp, Oryza sativa
atggattctgcaagcactacctgtggcctctcctccattaccttctgccgctcacgccgtcgtcgctgggcgggttgccgttcgaccgcgcgctctaccattctttcctctcggcgaaccgggccttcgccgaccgcctcaccgaggtgttcagccccgacgacgacctcgtctggatccacgattaccacctccttgccctccccaccttcctccgcaagcgattcccgcgcgccaaggtcggtttcttcctccactcgccgttcccctcctcggagatcttccgcaccattcccgtcagggaggacctcctccgcgccctcctcaacgccgacctcgtcggcttccacaccttcgactacgcgcgccacttcctctccgcctgctcgcggctgctcggcctggattaccagtccaagcgcggctacatcggcatcgagtactatggtcgcaccgtcacggtcaagattctgcccgtcgggatcgacatgggccagctga

SEQ ID NO: 82 - protein, 166 aa, Oryza sativa
MDSASTTCGLSSITFCRSRRRRWAGCRSTARSTILSSRRTGPSPTASPRCSAPTTTSSGSTITTSLPSPPSSASDSRAPRSVSSSTRRSPPRRSSAPFPSGRTSSAPSSTPTSSASTPSTTRATSSPPARGCSAWITSPSAATSASSTMVAPSRSRFCPSGSTWAS

SEQ ID NO: 83 - DNA, 1314 bp, Oryza sativa
atgaacaagcagaaacccatttggttgaggaagccagaggagatcaccaaggaagagtacgctgctttctacaagagcttgacaaacgactgggaggaacatctggctgtcaagcacttctctgtggagggtcagcttgaattcaaggccatcctgtttgtaccaaagagagcgccatttgacctctttgacaccaggaagaagcaaaacaacatcaagctgtacgtacgccgggtgtttatcatggacaactgtgaggagttgatcccagagtggctcagctttgtcaagggcattgttgattctgaagaccttcccctcaacatctcacgtgagatgctccagcagaacaagatcctgaaggtgatccgcaagaaccttgtgaagaagtgcgtggagctcttctttgagatcgctgagaacaaggaagactacaacaagttctacgaggctttctccaagaatctcaagcttggcatccatgaggattccaccaacaggaccaagattgctgagctcctgaggtatcactccaccaagagtggtgatgagttgaccagcctcaaggactacgtaacccggatgaaggagggccagagtgagatctattacatcactggtgagagcaagaaggctgttgagaactcccccttcctcgagaagctgaagaagaagggttatgaggtcctgtacatggttgatgccattgatgagtacgctgttggtcagcttaaggagtttgaaggcaagaagctcgtctctgccaccaaggaaggtctgaagcttgatgagagtgaggacgagaagaagcggcaggaggaactcaaggagaagttcgagggtctgtgcaaggtgatcaaggaggtgctcggtgacaaggtggagaaggttgttgtctctgaccgtgtggtggactctccctgctgtctagtcactggggagtatggctggactgctaacatggagaggatcatgaaggcccaggctctgagggactccagcatggccggctacatgtctagcaagaagaccatggagatcaacccggagaatgccatcatggacgagctccgcaagcgtgccgatgcggacaagaatgacaagtccgtgaaggacctggtgatgctgctcttcgagactgccctgctgacctccggtttcagcttggaggaccccaacaccttcggcaccaggatccaccgcatgctcaagctcggcctgagcatcgacgaggacgagtccgccgaggctgacgccgacatgccgccgctggaggacgacgccggcgagagcaagatggaggaggtcgactaa

SEQ ID NO: 84 - protein, 437 aa, Oryza sativa
MNKQKPIWLRKPEEITKEEYAAFYKSLTNDWEEHLAVKHFSVEGQLEFKAILFVPKRAPFDLFDTRKKQNNIKLYVRRVFIMDNCEELIPEWLSFVKGIVDSEDLPLNISREMLQQNKILKVIRKNLVKKCVELFFEIAENKEDYNKFYEAFSKNLKLGIHEDSTNRTKIAELLRYHSTKSGDELTSLKDYVTRMKEGQSEIYYITGESKKAVENSPFLEKLKKKGYEVLYMVDAIDEYAVGQLKEFEGKKLVSATKEGLKLDESEDEKKRQEELKEKFEGLCKVIKEVLGDKVEKVVVSDRVVDSPCCLVTGEYGWTANMERIMKAQALRDSSMAGYMSSKKTMEINPENAIMDELRKRADADKNDKSVKDLVMLLFETALLTSGFSLEDPNTFGTRIHRMLKLGLSIDEDESAEADADMPPLEDDAGESKMEEVD

SEQ ID NO: 85 - DNA, 531 bp, Oryza sativa
atggcaccttccaaggtcagcctcgccgccgtgctcgccgtggccatctcgctggccatggcggccaccaccaccacctcggcgcagaacacgccgcaggactacgtcaacctgcacaacagcgcgcggcgcgcggacggcgtcggcccggtgagctgggaccccaaggtcgccagcttcgcgcagagctacgcggccaagcgcgccggcgactgccggctgcagcactccggcgggccgtacggcgagaacatcttctggggctcggcggggcgcgcctggagcgccgccgacgcggtggcgtcgtgggtgggcgagaagaagaactaccactacgacaccaacacgtgcgacccgggcaaggtgtgcggccactacacccaggtggtgtggcgcaagtcggtgcgcatcggctgcgcccgcgtcgtgtgcgcggcgaaccgcggcgtgttcatcacctgcaactacgaccccccgggcaacttcaacggcgagcgcccgttcctcaccctcgacgccgcggccaagtag

SEQ ID NO: 86 - protein, 176 aa, Oryza sativa
MAPSKVSLAAVLAVAISLAMAATTTTSAQNTPQDYVNLHNSARRADGVGPVSWDPKVASFAQSYAAKRAGDCRLQHSGGPYGENIFWGSAGRAWSAADAVASWVGEKKNYHYDTNTCDPGKVCGHYTQVVWRKSVRIGCARVVCAANRGVFITCNYDPPGNFNGERPFLTLDAAAK

SEQ ID NO: 87 - DNA, 510 bp, Oryza sativa
atggctctcgtggagggaaacaacggcgtgtcggggggagcggtcagcttcagcgaggagcaggaggcgcttgtgctcaagtcgtgggccatcatgaagaaggattccgccaacattggactccgcttcttcttgaagatcttcgaggtcgcgccgtcggcgagccagatgttctcgttcctgcgcaactccgacgtgccgctcgagaagaaccccaagctcaagacccacgccatgtccgtcttcgtcatgacatgtgaggccgccgcgcagctgcggaaagccgggaaggtcaccgtgagagacaccaccctgaagaggctcggcgccacgcacttcaagtacggcgtcggagacgcccactttgaggtgacgaggttcgcgctgcttgagacgatcaaggaggcggttccggtggacatgtggagccccgcgatgaagagcgcgtggagcgaagcctacaaccaactggtcgcggccatcaagcaggagatgaagcctgctgagtga

SEQ ID NO: 88 - protein, 169 aa, Oryza sativa
MALVEGNNGVSGGAVSFSEEQEALVLKSWAIMKKDSANIGLRFFLKIFEVAPSASQMFSFLRNSDVPLEKNPKLKTHAMSVFVMTCEAAAQLRKAGKVTVRDTTLKRLGATHFKYGVGDAHFEVTRFALLETIKEAVPVDMWSPAMKSAWSEAYNQLVAAIKQEMKPAE

SEQ ID NO: 89 - DNA, 501 bp, Oryza sativa
atggagagcgccatgttcgggctggagacgccgctgatgacggcgctgcagcacctgctcgacatccccgacggcgagggcggcgccgccgggaagcagggcgcgaccggtggcccgacgcgtgcgtacgtgcgcgacgcccgcgccatggcggcgacccccgccgacgtgaaggatctgcccggggcgtacgcgttcgtggtggacatgcctgggctcaagtcctccgacatcaaggtgcaggtggaggaggagaggctgctggtgatcagcggggagcggcggcgcggcggcggggaggaggagaaggaggagtcgtgcaagtacctgcggatggagcggcggatgggcaagttcatgcgcaagttcgtgctccccgacaacgccgacgtcgacaagatctccgccgtgtgccaggacggcgtgctcaccgtcaccgtcgagaagctcccgccgccggagcccaagaagcccaagaccatcgaggtcaaggtcgcgtga

SEQ ID NO: 90 - protein, 166 aa, Oryza sativa
MESAMFGLETPLMTALQHLLDIPDGEGGAAGKQGATGGPTRAYVRDARAMAATPADVKDLPGAYAFVVDMPGLKSSDIKVQVEEERLLVISGERRRGGGEEEKEESCKYLRMERRMGKFMRKFVLPDNADVDKISAVCQDGVLTVTVEKLPPPEPKKPKTIEVKVA

SEQ ID NO: 91 - DNA, 576 bp, Oryza sativa
atgcctgccatggccaagcccgcctcccgcgctgccaagcccgcgtcggcgccgaagaagcagaaggcaaagccctccgccgccgccggtggctcctcccacccgccttatttcgagatgatcaaggaggcgatcacggtgcttaaggagaggaccggctcgagcgcgcacgccatcgccaagtacatggaggagaagcacggggcgtcgctgccggccaactacaagaagatgctctccatccagctgcgcgggttcgcttccaagggcaagctcgtcaaggttaaggcctcctacaagctctccgacgccgccaaggactcgcccaaggccaagcctgccgcccccgcccccaaggcagcagcgccgaagccagcgaaggacgccgccaaacccaagaaggacgccgccgctgccaaacccaagaaggcccccgccgctggcaccaagcgcaaggcgccggagaagaaggtggtcgccaagcccaagaagtctccggcggcgaaggcgaaggccaagcccaagaccgtccggtcgccggccgcgaagaagacccgcaaggcacctgcagcttga

SEQ ID NO: 92 - protein, 191 aa, Oryza sativa
MPAMAKPASRAAKPASAPKKQKAKPSAAAGGSSHPPYFEMIKEAITVLKERTGSSAHAIAKYMEEKHGASLPANYKKMLSIQLRGFASKGKLVKVKASYKLSDAAKDSPKAKPAAPAPKAAAPKPAKDAAKPKKDAAAAKPKKAPAAGTKRKAPEKKVVAKPKKSPAAKAKAKPKTVRSPAAKKTRKAPAA

SEQ ID NO: 93 - DNA, 1074 bp, Oryza sativa
atgaccgtcgtcgtcgttgccgatgacgccgccgccgccgcagcggcggcgcagcagcaggaggagctgccgccggggcacggccaaacggtgtgtgtcaccggcgccgccgggtacatcgcgtcgtggctcgtcaagctgctgctggagaggggctacaccgtgaagggcacagtgagaaacccagatgacccgaagaacgcccacctgaaggcgctggacggcgccgacgagaggctggtcctctgcaaggccgacctcctcgactacgactccatccgcgccgccgtcgacggctgccacggcgtgttccacaccgcctcccccgtcaccgatgaccctgagcagatggtggagccggcggtgcgggggacggagtacgtgataaaggcggcggcggaggccggcacggtgcgccgggtggtgttcacgtcgtccatcggcgccgtcaccatggaccccaaccgcggccccgacgtggtcgtcgacgagtcctgctggagcgacctcgagttctgcaagaaaaccaagaactggtactgctacggtaaggcggtggcagagcaggaggcgtgcaaggcgggcgaagagcgcggcgtcgacctcgtcgtcgtcagccccgtgctggtggtcggcccgctgctgcagccgacggtgaacgccagcgccgtgcacatcctcaagtacctcgacggctcggccaagaagtacgccaatgccgtgcaggcgtacgtggacgtgcgcgacgtcgcggctgcgcacgtccgcgtcttcgaggcgccggaggcctccggccggcacctctgcgccgagcgcgtcctgcaccgtgaggacgtcgtccacatcctcggcaagctcttccccgagtatcctgtgcccacaaggtgctctgacgaggtgaacccacggaagcagccgtacaagatgtccaacaagaagctgcaggatcttggcctccacttcatacctgtgagcgactcgctctacgagacggtgaagagcctccaggagaaggggcaccttccagttctgagcaaagagatcccagaagagttgaatggtgtgccagcatga

SEQ ID NO: 94 - protein, 357 aa, Oryza sativa
MTVVVVADDAAAAAAAAQQQEELPPGHGQTVCVTGAAGYIASWLVKLLLERGYTVKGTVRNPDDPKNAHLKALDGADERLVLCKADLLDYDSIRAAVDGCHGVFHTASPVTDDPEQMVEPAVRGTEYVIKAAAEAGTVRRVVFTSSIGAVTMDPNRGPDVVVDESCWSDLEFCKKTKNWYCYGKAVAEQEACKAGEERGVDLVVVSPVLVVGPLLQPTVNASAVHILKYLDGSAKKYANAVQAYVDVRDVAAAHVRVFEAPEASGRHLCAERVLHREDVVHILGKLFPEYPVPTRCSDEVNPRKQPYKMSNKKLQDLGLHFIPVSDSLYETVKSLQEKGHLPVLSKEIPEELNGVPA

SEQ ID NO: 95 - DNA, 465 bp, Oryza sativa
atgcagtacggctcgatcgggtggtccgtcggcgccacgctcggctacgcccaggcggccaaggacaagcgcgtcatctcctgcatcggtgacggtagcttccagatgacggcgcaggacgtgtcgacgatgttgcggtgcgggcagaagagcatcatcttcctcatcaataatggtgggtacaccatcgaggtggagatccacgacgggccgtacaacgtcatcaagaactgggactacaccggcctcatcgacgccatccacaactctgacggcaactgctggacaaagaaggtccggactgaggaggagctgatagaggcgatcgcgacggcaacgggcgccaagaaagattgcctctgcttcatcgagatcatcgtgcacaaggatgacacgagcaaagagcttctcgagtggggatccagggtatcggctgccaacagcaggccgccgaatccccagtga

SEQ ID NO: 96 - protein, 154 aa, Oryza sativa
MQYGSIGWSVGATLGYAQAAKDKRVISCIGDGSFQMTAQDVSTMLRCGQKSIIFLINNGGYTIEVEIHDGPYNVIKNWDYTGLIDAIHNSDGNCWTKKVRTEEELIEAIATATGAKKDCLCFIEIIVHKDDTSKELLEWGSRVSAANSRPPNPQ

SEQ ID NO: 97 - DNA, 1014 bp, Oryza sativa
atggatctcttcaggaagtgtatggagcctgtggagaagtgcctcagggatgctaagatggacaagagctctgttcatgatgttgtccttgttggtggctccactaggatcccgagggtgcagcagctcctgcaggatttcttcaacggcaaggagctttgcaagaacatcaacccagatgaggctgttgcttatggtgctgctgtccaggctgccatcttgagtggtgagggcaacgagaaggtccaggacctcctcctgttggatgttacccctctctctctcggattggagactgctggtggtgtcatgaccgttttgatcccaaggaacaccaccattcccaccaagaaggagcaggtcttctccacctactccgacaaccagcctggtgtgctcatccaggtttatgagggtgagaggaccaggacacgtgacaacaacctgctggggaagtttgagctctctggaatccctcctgctcccaggggtgttccacagatcactgtttgcttcgacattgatgccaatggtatcctgaacgtgtctgctgaggacaagaccaccgggcagaagaacaagatcaccattaccaacgacaagggcaggcttagcaaggaggagattgagaagatggtccaggaggccgagaagtacaagtcagaggatgaggagcacaagaagaaggtggagtccaagaacgcgctggagaactacgcctacaacatgcgcaacaccatcaaggatgagaagatcgcctcgaagctcccggcagcggacaagaagaagatcgaggatgccatcgaccaggccatccagtggctggacggcaaccagctcgctgaggctgatgagttcgatgacaagatgaaggagctggagggcatctgcaaccccatcatcgccaagatgtaccagggcgctggcgcggacatggccggcggcatggacgaggacgatgctcccccggctggcggcagcggtgctggccccaagatcgaggaggtcgactaa

SEQ ID NO: 98 - protein, 337 aa, Oryza sativa
MDLFRKCMEPVEKCLRDAKMDKSSVHDVVLVGGSTRIPRVQQLLQDFFNGKELCKNINPDEAVAYGAAVQAAILSGEGNEKVQDLLLLDVTPLSLGLETAGGVMTVLIPRNTTIPTKKEQVFSTYSDNQPGVLIQVYEGERTRTRDNNLLGKFELSGIPPAPRGVPQITVCFDIDANGILNVSAEDKTTGQKNKITITNDKGRLSKEEIEKMVQEAEKYKSEDEEHKKKVESKNALENYAYNMRNTIKDEKIASKLPAADKKKIEDAIDQAIQWLDGNQLAEADEFDDKMKELEGICNPIIAKMYQGAGADMAGGMDEDDAPPAGGSGAGPKIEEVD

SEQ ID NO: 99 - DNA, 684 bp, Oryza sativa
atgtcccgcctgccggctcgcgtcgccggcgccgtagctcgcggcatcgtcaccttcgtcttcgccacagtgggcacgatcctgggggcgatcaccggcgggctgatcgggctggcgacggagagcggcatggtgcggggcaccgggatcggggccatctccggcgcggtggtcgccatggaggtcgtcgactcctccgtcgccatgtggtgctcccacgactccgggatctggagcgttctctacgtccttgacgtgatctggagcctcctgacggggcggctggtgcgggagaaggtggatccggcggtgcagaacgcggtggacagccagatgaacgccgccgacgcgcccttcagggagagcgcgccgacgctggcggagatgttcgacaccggcatccccggcgtcgccgccgccgccacgggcatgccggcggacgccatcgccgcgctcccggtcaccacgttcgccgccgccgccggcggcgacgaccgcgccggctgctccgtgtgcctccaggacttggaggacggcgagcgggcgcggaggctgccggagtgcggccacacgttccacctccgctgcatcgacagctggctgctcaggcacgcgtcgtgccccctgtgccggcgcacggtggtcgccgccgccgtcgccgtcgacgacgtcgtcgtcggctga

SEQ ID NO: 100 - protein, 227 aa, Oryza sativa
MSRLPARVAGAVARGIVTFVFATVGTILGAITGGLIGLATESGMVRGTGIGAISGAVVAMEVVDSSVAMWCSHDSGIWSVLYVLDVIWSLLTGRLVREKVDPAVQNAVDSQMNAADAPFRESAPTLAEMFDTGIPGVAAAATGMPADAIAALPVTTFAAAAGGDDRAGCSVCLQDLEDGERARRLPECGHTFHLRCIDSWLLRHASCPLCRRTVVAAAVAVDDVVVG

SEQ ID NO: 101 - DNA, 978 bp, Oryza sativa
atggagaccatcgcccacaccaaggcgacccgccccgagacggacccggacaccgacatgtccgtggaagcccaggagtttaagcaggtcgtcgacgagatcatcccgcacatcggcgcggccaacctgtgggactacttgccggcgctccggtggttcgacgtgttcggcgtcaggaggaagatcctcgccgctgtaagccggagggacgcgttccttcgccgcctgatcgacgcggagcggcggaggctggacgacggcgacgagggcgagaagaagagcatgatcgccgtgctgctcactctgcagaagacagagccggaggtgtacaccgataacatgatcacagctctaacggcgaacttgttcggagcaggaacagagacaacctcgacgacatcagaatgggcgatgtcgctactgctgaaccaccccgacacactcaagaaagcgcaagccgagatcgacgcatccgtcggcaactctcgcctgatcaccgccgacgacgtgactcgcctcggctacctccagtgcatcgtcagggagacgctccgcctgtaccccgccgcgccgatgctcctcccgcacgagtcctccgccgactgcaaggtcggcggctacaacatcccgcgcgggtcgatgttgctcatcaacgcgtacgccatccaccgtgacccggcggtgtgggaggagccggagaagttcatgccggagaggttcgaggacggcgggtgcgacggcaatctcttgatgccgttcgggatggggaggcggaggtgccccggcgagacgctggcgctgcgcacagtggggttggtgctgggcacgctgatccagtgcttcgactgggagagggtcgacggcgtggaggtcgacatgactgaaggtggcgggctcaccatccccaaggtcgtgccgttggaggccatgtgcaggccgcgcgacgccatgggtggtgttcttcgcgagctcgtctga

SEQ ID NO: 102 - protein, 325 aa, Oryza sativa
METIAHTKATRPETDPDTDMSVEAQEFKQVVDEIIPHIGAANLWDYLPALRWFDVFGVRRKILAAVSRRDAFLRRLIDAERRRLDDGDEGEKKSMIAVLLTLQKTEPEVYTDNMITALTANLFGAGTETTSTTSEWAMSLLLNHPDTLKKAQAEIDASVGNSRLITADDVTRLGYLQCIVRETLRLYPAAPMLLPHESSADCKVGGYNIPRGSMLLINAYAIHRDPAVWEEPEKFMPERFEDGGCDGNLLMPFGMGRRRCPGETLALRTVGLVLGTLIQCFDWERVDGVEVDMTEGGGLTIPKVVPLEAMCRPRDAMGGVLRELV

SEQ ID NO: 103 - DNA, 942 bp, Oryza sativa
atgcttcggacggagaagcacatcggatatagagaggaggaagaagaggaggaagagatgagcggcggcggcaaacggcgaggaggccggcggcgagggcaggcgcacggcgacgagacgacggcgtacggagcgccatcatcaggcggcagcgtcgtcccaggtggcggcccagttggtggcgctgccgacgcggggcatggagttgatcttggtgaaggtgtcgaccttgaaggtggcgccgcacatgacgccctcgctgtccacccgcggcatcgccttcagccggttcatcgggtgctcgaagctcttgagccccccctcgctgtggaacatgcaccccaccgggaacggcgcgtacgacttgccgcaccctcccttcacgatctccctctcgtcgcagatcaccaccgacccatccgccgcgatcccccaatacaacggcacctccccatccgtactcagggcggcgaagacggcgccggacttgttgtcgaagacgacgaaggcgaaggagccggagagatccttgacgacctggtcggcggggtaggggccgcggtcgcggagggtgcggtaggcctcgatgacgagcagcgcctcgttggtggagcggctgcacagcccgtactgccggatcaggctgctcaggttgtccagcctccccatgaacacgcagtagatgtcatccagcccacagaacatcctctcgtagccagagaggccattgcgggcgtggccggcgacgcaggcgagggcggcgccgccgccgaaggaggtggagaaggcctcgatggggtggagggcgtggaagtccctgaggatctcgtcggggttcttgggcttcgccgcgctgctccgcgggctgttcagctccgccggcgcgtgcgccacctgcttctggaatatggccaacattttcttcttcctcttgctagctag

SEQ ID NO: 104 - protein, 313 aa, Oryza sativa
MLRTEKHIGYREEEEEEEEMSGGGKRRGGRRRGQAHGDETTAYGAPSSGGSVVPGGGPVGGAADAGHGVDLGEGVDLEGGAAHDALAVHPRHRLQPVHRVLEALEPPLAVEHAPHRERRVRLAAPSLHDLPLVADHHRPIRRDPPIQRHLPIRTQGGEDGAGLVVEDDEGEGAGEILDDLVGGVGAAVAEGAVGLDDEQRLVGGAAAQPVLPDQAAQVVQPPHEHAVDVIQPTEHPLVAREAIAGVAGDAGEGGAAAEGGGEGLDGVEGVEVPEDLVGVLGLRRAAPRAVQLRRRVRHLLLEYGQHFLLPLAS

SEQ ID NO: 105 - DNA, 1113 bp, Oryza sativa
atgcgtatatgtgtacggaatgcatcagaagctgatggggtagacgtgctgcatgttggggtagaagaggccccaattctgctcgacgccggcgtccttctggttctcgttgaacatggagaagacgtaggtctcgatggcgccggggtggcgcggcgtgccgcggccgacgtggttgatgaggttctggttgtagatccgggcgttggccggcgaggcggacatgccgccggcggagggccagcctgtctcggagacgacgagggagacgccggagccgccgtgcttggccatggcggcgtagaacgcgtcgacggtggtgtcgaacaggttctggtacccgtaggcgccgtcctggacgacggtgccggcggcggtgaagagcgcgtaggagacgtcgacgctgccctggctgtaggtgtaggagaagtaggggtagatgttggcgagcagcggcgcgccggtgcgggcgaggaagctcaggacgggcgccatgaacgcctgcgactcgccggtgaactccgcggcggacggcgggctgtacacggcgaggagcgcctgcgacaccgacgtcgtcaccttgatgtggcccagccccgccgacaccagcgcgccgcggacgttctccatggccgggaccaggctggacgtggcgccgccggcgacctcgttcccgacggcgacgtaccggaacgacaccgacgggtaggcctggatgttgttccgcacccacgacgccgccgcggcggggctggcggcgaggttggagagcacgtcgttgggcgcgccgacgacgacgctgatccccgtgccgcccaccgactgcagcgccgcctggtccggcgcgtacagccgcatcgacgtgatgccgttggagcggtacatccccaccaccgagctcgccggcggcaggttgttcgcgctcatgccgtagcacaccccgatcgcctccgccttttgaggaatggaggcaaaggcaccgaggagcaatgcgagagcgaacatggaggctacaccttggctagccatttctctcaaaacctctctcaaattccaaaagctaaaaatgagctatatataggagatgtggtttgtgtgtgctgctgccaatga

SEQ ID NO: 106 - protein, 370 aa, Oryza sativa
MRICVRNASEADGVDVLHVGVEEAPILLDAGVLLVLVEHGEDVGLDGAGVARRAAADVVDEVLVVDPGVGRRGGHAAGGGPACLGDDEGDAGAAVLGHGGVERVDGGVEQVLVPVGAVLDDGAGGGEERVGDVDAALAVGVGEVGVDVGEQRRAGAGEEAQDGRHERLRLAGELRGGRRAVHGEERLRHRRRHLDVAQPRRHQRAADVLHGRDQAGRGAAGDLVPDGDVPERHRRVGLDVVPHPRRRRGGAGGEVGEHVVGRADDDADPRAAHRLQRRLVRRVQPHRRDAVGAVHPHHRARRRQVVRAHAVAHPDRLRLLRNGGKGTEEQCESEHGGYTLASHFSQNLSQIPKAKNELYIGDVVCVCCCQ

SEQ ID NO: 107 - DNA, 1311 bp, Oryza sativa
atgtcgatcgtgtcgtacggggagaggagcgaggaggaggcgcggcggctgtacgcggagtggaaggccgagcacggcaagagctacaacgccgtcggcgaggaggagcggcggtacgcggcgttcagggacaacctccggtacatcgacgagcacaacgccgccgccgacgccggggtccactccttccgcctcggcctcaaccgcttcgccgacctcaccaacgaggagtaccgggacacctacctcggcctcaggaacaagccgcggagggagaggaaggtcagcgacaggtacctcgccgccgacaacgaggcgctgccggagtccgttgactggaggaccaagggggccgtggctgagatcaaggaccagggaggttgcggaagttgctgggctttctcagcaatagcagctgtagaaggcatcaaccagattgttactggcgacctgatatctttgtctgagcaggagctagttgactgtgacacttcatataacgagggatgcaatggaggtctgatggactatgcatttgatttcatcatcaacaatggtggaatcgacaccgaggatgactacccttacaaaggcaaggacgaacggtgtgacgtaaacaggaaaaacgcaaaggttgtcacaattgacagctacgaagatgtaacaccaaacagtgagacgagtctgcagaaggcggtagcaaaccagcccgtcagtgttgcaattgaagccggtggcagagcattccagctctactcatcgggtatcttcacgggtaaatgtggaacagcactagaccacggcgtcgctgctgttgggtacggcacagagaatggcaaggactactggatcgtgaggaactcgtggggcaagagctggggtgagtccggctacgtccgtatggagcgcaacatcaaggcgagcagtggcaagtgcggcattgccgttgagccatcctaccctctgaagaagggcgagaaccccccgaaccccggccctactccgccgtccccaaccccgcctcccaccgtctgcgacaactactacacttgccccgatagcaccacctgctgctgcatctacgagtatggcaaatactgctacgcctggggctgctgcccactcgagggcgccacctgctgcgatgatcactacagctgctgccctcacgagtaccccatctgcaatgttcagcagggaacctgcctcatggctaaggacagtccactggcagtgaaggctctgaagcgtaccctggcaaagccaaacttgtctttcttgtttggcaacggcaagaagagcagcgcttga

SEQ ID NO: 108 - protein, 436 aa, Oryza sativa
MSIVSYGERSEEEARRLYAEWKAEHGKSYNAVGEEERRYAAFRDNLRYIDEHNAAADAGVHSFRLGLNRFADLTNEEYRDTYLGLRNKPRRERKVSDRYLAADNEALPESVDWRTKGAVAEIKDQGGCGSCWAFSAIAAVEGINQIVTGDLISLSEQELVDCDTSYNEGCNGGLMDYAFDFIINNGGIDTEDDYPYKGKDERCDVNRKNAKVVTIDSYEDVTPNSETSLQKAVANQPVSVAIEAGGRAFQLYSSGIFTGKCGTALDHGVAAVGYGTENGKDYWIVRNSWGKSWGESGYVRMERNIKASSGKCGIAVEPSYPLKKGENPPNPGPTPPSPTPPPTVCDNYYTCPDSTTCCCIYEYGKYCYAWGCCPLEGATCCDDHYSCCPHEYPICNVQQGTCLMAKDSPLAVKALKRTLAKPNLSFLFGNGKKSSA

SEQ ID NO: 109 - DNA, 699 bp, Oryza sativa
atggcgccttccctcgccacctcttccaccctcgctctcttcctcctcgtcgccgtctccatcgccgacgccgcgacattcgccatcaccaacaggtgccagtacacggtgtggccggcggcggtgccatcgggcggcggcacgaagctcgacccggggcagacgtggaccatcaacgtgccggccgggacgacgggcgggcgcgtgtgggcgcgcacgggctgcggtttcgacggcagcggcaacgggcagtgccagacgggcgactgcggcgggaagctgcggtgcacggcgtacggcgcggcgcccaacaccctggccgagttcgcgctgaaccagtggaacaacctcgacttcttcgacatctccctcatcgacggcttcaacgtgcccatggccttcctccccgccggcagcggcgccgggtgccccaaaggcgggccgcggtgcgccacggccatcacgccgcagtgccccagcgagctgagggcgcccggcgggtgcaacaacgcgtgcacggtgttcaggcaggacaggtactgctgcaccggatcggcggccaacagctgcggcccgaccaactactcggagttcttcaagcggctgtgcccggacgcctacagctaccccaaggacgacgcctccagcacctacacttgcccggccggcaccaactaccaggtcgtcttctgcccatga

SEQ ID NO: 110 - protein, 232 aa, Oryza sativa
MAPSLATSSTLALFLLVAVSIADAATFAITNRCQYTVWPAAVPSGGGTKLDPGQTWTINVPAGTTGGRVWARTGCGFDGSGNGQCQTGDCGGKLRCTAYGAAPNTLAEFALNQWNNLDFFDISLIDGFNVPMAFLPAGSGAGCPKGGPRCATAITPQCPSELRAPGGCNNACTVFRQDRYCCTGSAANSCGPTNYSEFFKRLCPDAYSYPKDDASSTYTCPAGTNYQVVFCP

SEQ ID NO: 111 - DNA, 660 bp, Oryza sativa
atgacgccggtgaaggtgtttgggccggcgcaatcgacgaacgtggcgagggtgctgttgtgcctggaggaggtcggcgccgagtacgaggtcgtcaacgtcgacttcacggtcatggagcacaagagccccgaacacctcaaacgcaacccgttcgggcaaatcccagctttccaggacggggatctgtacctctttgagtcccgcgctattggaaagtacatcctacgcaagtacaagacgagggaagctgacctactccgggaaggcaacttgagggaggcagccatggtggatgtctggaccgaggtggagacacaccagtacaactcggcgatttcaccgattgtgtacgagtgcatcatcaacccagccatgcgtgggatcccaactaaccaaaaggtcgtggacgagagcgcggagaagctgaagaaggtgctggaggtgtacgaggcacgactgtcacagagcacgtacctcgcaggtgacttcgtcagcttcgccgacctgaaccacttcccctacaccttctacttcatggggacaccgtacgcgtcgctgttcgactcgtaccctcatgtgaaggcatggtgggagaggctcatggcgaggccgtccgtcaagaagctcgccgcggtcatggctcctcagggggcgtag

SEQ ID NO: 112 - protein, 219 aa, Oryza sativa
MTPVKVFGPAQSTNVARVLLCLEEVGAEYEVVNVDFTVMEHKSPEHLKRNPFGQIPAFQDGDLYLFESRAIGKYILRKYKTREADLLREGNLREAAMVDVWTEVETHQYNSAISPIVYECIINPAMRGIPTNQKVVDESAEKLKKVLEVYEARLSQSTYLAGDFVSFADLNHFPYTFYFMGTPYASLFDSYPHVKAWWERLMARPSVKKLAAVMAPQGA

SEQ ID NO: 113 - DNA, 987 bp, Oryza sativa
atggccgcggcgccgggcgaggttagcggcggccaaggcaacggcggcgtcaccgccatcgccgagctcaccatctcctcgctgccgctggagacgcgatgcgcgccgttccccctgcgtcagcacggcggcttctggctgccggagacgttcctcccggggctcgaggccgcgcgcgcgcgcttcgagccgcggccgtccgacgtcctcctcgcgagcttccccaagtccggcaccacctggctcaaggcgctcgccttcgcgacgctcaaccgggccgcctacccgccctccggcgagggccacccgctccgccgtcgtggcccgcacgactgcgtgcagttcctcgagtcggcgcttgtggtgtccgacgacatgtttgcttcactcccttcgccgcgtttactgtctacccacctgccttactccctcctgcctgagggcgtcaaggcggatagctccggctgtcgtatcgactacatttgcagggatcccaaagacgtgcttgtctcctggtggctgtttaccaagaaggccttgggcactcaagatggacctaccaacggaggcaacaagccaatgctttccaacggaccatactggcgccacgtgctggagtattgggcagagagcaagaggaggccacagaaggttctcttcctccgctacgaggagatgacacgagagacgacgagcaacgtgaggaagctggccgagttcatgggctgcccgttctccggcgaggaggaggcagacggcgtgccggacgccatcgtcggcctctgcagcttcgaccatctcaggagcttggaggtaaacaggaatggtgccaatgatttcaacatcaaaaacgactcgttctaccgaaagggggtggctggagactgggccaattatttgtcacctgagatggcggcacagctggatctggtcattgacgacgagttgcggtcctctgggtttagctttgccaccggtggacggtaa

SEQ ID NO: 114 - protein, 328 aa, Oryza sativa
MAAAPGEVSGGQGNGGVTAIAELTISSLPLETRCAPFPLRQHGGFWLPETFLPGLEAARARFEPRPSDVLLASFPKSGTTWLKALAFATLNRAAYPPSGEGHPLRRRGPHDCVQFLESALVVSDDMFASLPSPRLLSTHLPYSLLPEGVKADSSGCRIDYICRDPKDVLVSWWLFTKKALGTQDGPTNGGNKPMLSNGPYWRHVLEYWAESKRRPQKVLFLRYEEMTRETTSNVRKLAEFMGCPFSGEEEADGVPDAIVGLCSFDHLRSLEVNRNGANDFNIKNDSFYRKGVAGDWANYLSPEMAAQLDLVIDDELRSSGFSFATGGR

SEQ ID NO: 115 - DNA, 732 bp, Oryza sativa
  misc_feature (337)..(337): n = any nucleotide
  misc_feature (340)..(340): n = any nucleotide
  misc_feature (342)..(342): n = any nucleotide
  misc_feature (362)..(362): n = any nucleotide
  misc_feature (380)..(380): n = any nucleotide
  misc_feature (673)..(673): n = any nucleotide
  misc_feature (726)..(726): n = any nucleotide
atgcccttctgctgctgcaaccgaccaaatggctcctgcggttgcctcctccccgtcactcgtgctctccgccgccgtcgccaccgcctccaacaagcgcccggccgattccgacgcctcgccgccgcaccagggagatcgcacggggcagcaggagaagaagcagcagcagctggagtgcccgcgctgccgatccaccaacaccaagttctgctactacaacaactacagcacgtcgcagccgcgccacttctgccgcgcctgccgccgctactggacgcacgggggcacgctccgcgacgtgccggtgggcggcgcctctcgccgcggcggcggnggnangcgccgcgggggctccgccncccggcccgctgctcggnggggcgcgccgccgggccgccgcgcccccgcccccggtgcgggcggcggggcccgggcggcggcggcggcgcgtctgcgcgcctcccccgcgtccctgttggcccggtcgccggccgccggtccccgcctggcccgcttcccgccccccccgcccccccgccgccgcgtccgctgccggggggcgtccgcggggtggtttcgtgctgccgcgcccccccggtcttctgctcccgccctcgccccccttcttctcccggtcattgcgcgccgcgtcccgcgcccgtccgccgcngcgtcgcccccgtctgcggggctccccccgtgttcggctcccccttgcccgcntcgtag

SEQ ID NO: 116 - protein, 243 aa, Oryza sativa
  X_region (113)..(114): Xaa = any naturally occuring amino acid
  X_region (121)..(121): Xaa = any naturally occuring amino acid
  X_region (127)..(127): Xaa = any naturally occuring amino acid
  X_region (225)..(225): Xaa = any naturally occuring amino acid
MPFCCCNRPNGSCGCLLPVTRALRRRRHRLQQAPGRFRRLAAAPGRSHGAAGEEAAAAGVPALPIHQHQVLLLQQLQHVAAAPLLPRLPPLLDARGHAPRRAGGRRLSPRRRXXAPRGLRXPARCSXGRAAGPPRPRPRCGRRGPGGGGGASARLPRVPVGPVAGRRSPPGPLPAPPAPPPPRPLPGGVRGVVSCCRAPPVFCSRPRPPSSPGHCAPRPAPVRRXVAPVCGAPPVFGSPLPAS

SEQ ID NO: 117 - DNA, 609 bp, Oryza sativa
atgttctccggcgccgggtcgtcgtcgtcgggcgcggggacgtcggcgggaggcggcggcggcgggccatcgccgtccagctcgtcgccgtcgctgagccggtacgagtcgcagaagcggcgggactggaacacgttcgggcagtacctgcggaaccaccggccgccgctgtccctgtcgcggtgcagcggcgcgcacgtgctggagttcctcaagtacatggaccagttcgggaagacgaaggtgcacacgccggtgtgccccttctacggccaccccaacccgccggcgccatgcccgtgcccgctccgccaagcctggggctccctcgacgcgctcatcggccgcctccgcgccgcctacgaggagaacggcggcacgccggagatgaaccccttcggcgcccgcgccgtccgcctctacctgcgcgaggtgcgcgagacgcaggccagggcgagggggatcagctacgagaagaagaagcgcaagaagccctcgtccgccggcgccggagccgggccctcgtccgaggggagcccgccgccacccggcggctcggccagcggcggcggcgacacgtcggcgtcgccgcagttcatcatcccgtga

SEQ ID NO: 118 - protein, 202 aa, Oryza sativa
MFSGAGSSSSGAGTSAGGGGGGPSPSSSSPSLSRYESQKRRDWNTFGQYLRNHRPPLSLSRCSGAHVLEFLKYMDQFGKTKVHTPVCPFYGHPNPPAPCPCPLRQAWGSLDALIGRLRAAYEENGGTPEMNPFGARAVRLYLREVRETQARARGISYEKKKRKKPSSAGAGAGPSSEGSPPPPGGSASGGGDTSASPQFIIP

SEQ ID NO: 119 - DNA, 336 bp, Oryza sativa
atgaagctcgcgatcgggcggcgcgggtcgcggagcccgacgcgggcgcggcggatggcgcggctgatcgccgtcacggcctcgtcctggccgacgatgcgccggtgcagcgacgactccatggcgaggagacggctcgactcgtcgacggtgaccttctccacggggacgccggtccagctggagacgatgtgctggacgtccgcctccgtcaccgtcggccccggcgactcgccggagtccaccgccgccttgctcatctccttgctcttgtcgaccagcgacatgatctccgacttgagctccacctcctcgccgcgaagcgctcccgcctaa

SEQ ID NO: 120 - protein, 111 aa, Oryza sativa
MKLAIGRRGSRSPTRARRMARLIAVTASSWPTMRRCSDDSMARRRLDSSTVTFSTGTPVQLETMCWTSASVTVGPGDSPESTAALLISLLLSTSDMISDLSSTSSPRSAPA

SEQ ID NO: 121 - DNA, 396 bp, Oryza sativa
atggtgctcttacaaacagaagaacactctaggcgcacgtacaacaacaaagtagcagcaccattctttctaccgcacggtcttcacgtgaacgatatcacgcgccggtcccggtggccccggcgtcggcgccggcgccgtggccgacctgcttggcgtcgaaggcgcggtcgtccaccttgcgcgcggcgggctcgtcgaccttgtcctgcaccttgtcgatctggatggcgccctggtcctcccgcgaacgcaggtccgtgcgcgtgcggttctccccgccgcccaccgactcgtacgtcgtcggcgtcgtctcgcccatcggctgcgcgccctgcgcccccgacattgctgcaaaaggcttggctcggctgctgcttccttcctttacgctga

SEQ ID NO: 122 - protein, 131 aa, Oryza sativa
MVLLQTEEHSRRTYNNKVAAPFFLPHGLHVNDITRRSRWPRRRRRRRGRPAWRRRRGRPPCARRARRPCPAPCRSGWRPGPPANAGPCACGSPRRPPTRTSSASSRPSAARPAPPTLLQKAWLGCCFLPLR

SEQ ID NO: 123 - DNA, 663 bp, Oryza sativa
atgacggccgccctgcaagcgctgctcgacccgacggcgctgtccttgggcctgcccacgccggcgatcaacaaggaggagtacctcgccatctgcctcgccgcgctcgcctgcacgcgggcggggaaggccctggtgggagtgggaggccagcagcaggtgcaggcctgcaataagtggctgtgcccagcgcccgcggcgcctgaggagctccgcttccggtgcaccgtctgcgggaaggccttcgcctcgtaccaggcgctcggcggacacaagtccagccaccggaagccgccttccccgggagaccactacggcgccgccgccgcggcgcagcagctggcatccgctggtgactcgaaggaggactcggcgtcgtcagcggccgggagcactggcccgcaccggtgcaccatctgcaggaggagcttcgcgacggggcaggcgctcggcggccacaagcgctgccactactgggacggcacgtcggtgtccgtctccgtctcggcgtccgcgtcggccgcctcgtcggccgtcaggaacttcgacctcaacctgatgccgctgccggagagcacagccgccgccgggatcaagaggtgggcggaggaggaggaggtgcagagtccactgccggtcaagaagctcaggatgtccaactaa

SEQ ID NO: 124 - protein, 220 aa, Oryza sativa
MTAALQALLDPTALSLGLPTPAINKEEYLAICLAALACTRAGKALVGVGGQQQVQACNKWLCPAPAAPEELRFRCTVCGKAFASYQALGGHKSSHRKPPSPGDHYGAAAAAQQLASAGDSKEDSASSAAGSTGPHRCTICRRSFATGQALGGHKRCHYWDGTSVSVSVSASASAASSAVRNFDLNLMPLPESTAAAGIKRWAEEEEVQSPLPVKKLRMSN

SEQ ID NO: 125 - DNA, 591 bp, Oryza sativa
atggacggcgcggccgactccggcacggcgggcgccgcggcggcggcggccaagtggcggaccgatgcctcgcgggcgttccagtactacctggaccgctccaccccgcacgccacggggcgctggatcggcaccctcgccgtcgccgccatctacgccctccgcgtctacctcgtccagggcttctacatcgtcacctacggcctcgggatctacctcctcaacctcctcatcggcttactctcccccatggtcgaccccgaggcccacgccgctgcctcctccgacggccccgccctccccacccgcgggtccgacgagttcaagcccttcatcaggcgcctccccgagttcaagttctggtatgcaatcccaaaagcttttcttatagcttttgtgaggactttcttctctgtatttgatgttcctgtcttctggccgatacttctctgctactgggttgttctttttgtcctcccgatgaagcgccagattgtgcacatgataaaatacaaatatgttcccttcagcgttgggaagcagaaatatggcgggaagaagagcgcaggcagcagttttttgaaagactga

SEQ ID NO: 126 - protein, 196 aa, Oryza sativa
MDGAADSGTAGAAAAAAKWRTDASRAFQYYLDRSTPHATGRWIGTLAVAAIYALRVYLVQGFYIVTYGLGIYLLNLLIGLLSPMVDPEAHAAASSDGPALPTRGSDEFKPFIRRLPEFKFWYAIPKAFLIAFVRTFFSVFDVPVFWPILLCYWVVLFVLPMKRQIVHMIKYKYVPFSVGKQKYGGKKSAGSSFLKD

SEQ ID NO: 127 - DNA, 816 bp, Oryza sativa
  misc_feature (523)..(523): n = any nucleotide
atggccgcggctgcggagacctcggcgaaggtgggggcgccgagaagatggtctcttcaagggaagacggcgctcgtcaccggcggcacccgcggaatcgggcgtgcggtggtggaggagctggcggcgctgggggccaccgtgcacacatgctcccggaaggaggaggagctgagcgagcgcctcaaggagtgggaggcccggggattccgcgtcaccacctccgtctgcgatctctcggttcgggaccagcgtgagcgcctcctccgccaagtcgctgacctcttcggcggcaagctcgatatcctcgtaaacaatgtggggacaaacataaggaagccaaccactgaattttctgccgaggaatactcttttatgatggcgactaatcttgaatctgcgtatcatctgtgccaactttcgcatcctcttctgaaagcatctgggtcagggagcattgttttcatatcatcagtctgtggattggtagctgtatttagtggttctctctatgctatgacanaaggtgcaatcaaccaattaaccaagaacctagcatgcgaatgggcgagaggcaacatacgatccaactctattgccccgtggtatatcaggacttcacttaccgaaggacttttggcaaataaggactttgaaggtgctgtggtgagccgaactccacttaggcgtgttggagaacctgaagaagtatcatcgctggttgcttttctttgcatgcctggttccagttacattactggccagacgatctcggttgatggaggtatgaccattaatggactctatccaagttaa

SEQ ID NO: 128 - protein, 271 aa, Oryza sativa
  X_region (175)..(175): Xaa = any naturally occuring amino acid
MAAAAETSAKVGAPRRWSLQGKTALVTGGTRGIGRAVVEELAALGATVHTCSRKEEELSERLKEWEARGFRVTTSVCDLSVRDQRERLLRQVADLFGGKLDILVNNVGTNIRKPTTEFSAEEYSFMMATNLESAYHLCQLSHPLLKASGSGSIVFISSVCGLVAVFSGSLYAMTXGAINQLTKNLACEWARGNIRSNSIAPWYIRTSLTEGLLANKDFEGAVVSRTPLRRVGEPEEVSSLVAFLCMPGSSYITGQTISVDGGMTINGLYPS

SEQ ID NO: 129 - DNA, 738 bp, Oryza sativa
atgcgggtgctcccggcgtcgtggtcctccgccgcctcctcctccgcctccgcctccgcggaccgcctcaactcccccaccccggcgccgccgccgccggcccctcctcctcctgctccaaaaagcagcagcagcagcagcgcggagctgtacctcaacatctacgacatctccccaatcaaccactacctctactggttcggcctcggcatcttccactccggcatcgaagtgcatggcatggagtatgggtttggagcccatgaatacccaaccagcggagtcttccaagtagagcccaaaagctgtcctggctttatcttcagacgctccgtgtgcgtgggttccactgatatgtctcgttcggaagtccgcagtttcatagaggatcttgcagaggattatcacggggacacttatcatttgattgcaaagaattgtaatcattttacagcagacatctgcaagcgtctgactggaaagccaattcctggatgggtcaatcgacttgccagattaggttctttctgcaactgtgtactgcctgaaagcatcaaggtttttgctgtcaaagatgtaaccgatccccccgagtttcctgatgatgatatggagtctaatgcatccattgttgacggaagtgatgcggatgatttagaccatcttctaataaccccaagtagcgatgttgtatcttcaaaagataagatattaactcctggcagggatagcttgtaa

SEQ ID NO: 130 - protein, 245 aa, Oryza sativa
MRVLPASWSSAASSSASASADRLNSPTPAPPPPAPPPPAPKSSSSSSAELYLNIYDISPINHYLYWFGLGIFHSGIEVHGMEYGFGAHEYPTSGVFQVEPKSCPGFIFRRSVCVGSTDMSRSEVRSFIEDLAEDYHGDTYHLIAKNCNHFTADICKRLTGKPIPGWVNRLARLGSFCNCVLPESIKVFAVKDVTDPPEFPDDDMESNASIVDGSDADDLDHLLITPSSDVVSSKDKILTPGRDSL

SEQ ID NO: 131 - DNA, 1371 bp, Oryza sativa
atgttcggggtgtggtgcaacttccggtacgaggtgttccctttcttctccggccgcccgctgctgcagcttccggcgttcgtggagacgccgccgccgccgccttcgccatcggcgaccagtggagagaaaacgaaaaataggattggtacagttctagcgatagttatgcctgcaatagctgcaatactgctcatggttgtagcatgcttttgttgctggaagaggatcaagaagagacgaccagaagaacagacgtttctgtcctgtaagtctgctaaaaattatgattcagttagttcagacgatattcagagcattgattcgcttatacttgatctaccaacaatacgagttgctacagatgattttgctgatactaaaatgatcggccaaggaggatttggtatggtttacaagggagtcctacctgatggccaagaaatagccgtgaagaggctttgccagagttccagacaaggaataggagagctgaaaagtgagctgattttggttgctaagctttaccacaagaatctagtaaggcttattggtgtttgcttggagcagcaagagaaaatacttgtctatgaatatatgccaaatggaagccttgatatcgttcttttcgataccgacaagaacagggagctagattgggggaaaagattcaagattataaatgggattgctcgaggcttgcaataccttcatgaagattctcaattgaagatagtgcaccgggacctcaaagcaagcaacatcctattggactttgattacagccctaagatttctgattttggcttagcaaagatatttggaggggatcaatcagaagatgtcactaatcgaatcgccggaacatatggatacatggcaccagaatacgctatgcgtggtaattattcaatcaaatcggacgtgttcagcttcggcgttttggtattagagattatcaccggaagaagaaacactggctcatatgatagtgggcaagatgttgatctcttaaacctagtgtgggagcactggacaaggggaaacgttgtagagctgattgatccatccatgggcgaccatcctccaatcgagcagatgttgaagtgcatccacatcgggttgttgtgtgttcagaaaaaacctgcaagcaggccgacgatttcgtcagtaaacatcatgcttagcagcaacactgttcgtctcccttctctatccaggccggcgttctgcatccaggaggttagtgccagtgacagctctaatccgtattcagaacgctatccaagaccaagacattccgggtattctgataattcaacagtggtgtcttcgaatgatttgtcaatcacagagcttgtgccgagatga

SEQ ID NO: 132 - protein, 456 aa, Oryza sativa
MFGVWCNFRYEVFPFFSGRPLLQLPAFVETPPPPPSPSATSGEKTKNRIGTVLAIVMPAIAAILLMVVACFCCWKRIKKRRPEEQTFLSCKSAKNYDSVSSDDIQSIDSLILDLPTIRVATDDFADTKMIGQGGFGMVYKGVLPDGQEIAVKRLCQSSRQGIGELKSELILVAKLYHKNLVRLIGVCLEQQEKILVYEYMPNGSLDIVLFDTDKNRELDWGKRFKIINGIARGLQYLHEDSQLKIVHRDLKASNILLDFDYSPKISDFGLAKIFGGDQSEDVTNRIAGTYGYMAPEYAMRGNYSIKSDVFSFGVLVLEIITGRRNTGSYDSGQDVDLLNLVWEHWTRGNVVELIDPSMGDHPPIEQMLKCIHIGLLCVQKKPASRPTISSVNIMLSSNTVRLPSLSRPAFCIQEVSASDSSNPYSERYPRPRHSGYSDNSTVVSSNDLSITELVPR

SEQ ID NO: 133 - DNA, 1764 bp, Oryza sativa
atggcgagcaggctcaaggaggacgagaggaacgagcggatcatacgcgggctgctcaagctgcccgccaacaagaggtgcatcaactgcaacaatttgggaccacaatatgtctgtacaaatttctggaccttcatttgtaccaattgcagtggagcacaccgagagttcacgcatcgagcgaagtcagtttctatggctaaatttactgcacaggaagttagtgcccttcaagaaggaggaaatgagcgtgctagagaaatattcttcaaggaatgggatgctcaccgcaattctttccctgacagcagtaatgcggataaattgaggaactttattaagcatgtttatgtggaacggagatacacaggagaaagaagtgcagatcggccaccgaggggaaaggatgataaggatgagtatagtgaaaacaggagatctgatggaaattggggtggttcaagaagtccgccatacaatgaaagctattctgatcgtcgcagttatagtggaaggagcgatgacagaaattccagatattcctatggagaacgaagtcctggctatgaacataatgattataagaaaagcccccgctactttgaagttgatgatagaaatcgtgaggatagatctggaaaaacaactccagttcaacggtttgaggaccgcaggccttctgaaccacagaggccagataatgggtctccaaattaccagaaggaaaccgatggatctagccctgttgtacggccagtgagggatatactgggtgataatgcacctcaactacgggttggtgagcctcctaagccaaatgtagcgagaacgattgatcctccgagaccaatcgatcctccaagaccgattgatcctccaagaccgattgatcctccaaggccaattgatcctccaagaccaaatggaaccagaaccatcgaacctccaccacagatgcagaggacatcaactgccagcagtattggttcttcagaggggacctccgaacagataaaagtggcaagtacgataagtttaattgatttcagtgctgatcctgagccttctgcatctgtgccacctccacaatctacacctacatcacaacagcagcctgctagtgcacagccagtgcaacctgttaatgcaccagcacaacagcctgctgtggaacaagggaaaaatgtgtcatcagtgagcagtggtggtggtgactgggcatcgtttgattctttcggccagcaacaaacaccacaaactggcaatagtgtagatccccttgagtctgcacttgctcaactatcattttctgaaacaccctctgcacccaattcatcagcttttccagcttcggtcatgcccacttcagttccaaatgatggagggtcatccatgatggggcagtcacattcttcattttttggtgcaccccctggagtctcaggtcaccaggcctcaacaggaatgtctatccatggatcttcagttcaacaaactggtctagctgctccggcagctggacttccgttccaggtctctgcgaattcccgagcaactagtggcattcaagaagcagcacctaatactgacagtagatccattggccggaaagaacttccagcggatatctttacttcgttatatccaccaggacctcaaacaatagggggttggcagagaacaccccaatttggaatgggatatgccatgccatatcagactgcaatgggaatgcaagcatatcctcagatggcgtttgcttaa

SEQ ID NO: 134 - protein, 587 aa, Oryza sativa
MASRLKEDERNERIIRGLLKLPANKRCINCNNLGPQYVCTNFWTFICTNCSGAHREFTHRAKSVSMAKFTAQEVSALQEGGNERAREIFFKEWDAHRNSFPDSSNADKLRNFIKHVYVERRYTGERSADRPPRGKDDKDEYSENRRSDGNWGGSRSPPYNESYSDRRSYSGRSDDRNSRYSYGERSPGYEHNDYKKSPRYFEVDDRNREDRSGKTTPVQRFEDRRPSEPQRPDNGSPNYQKETDGSSPVVRPVRDILGDNAPQLRVGEPPKPNVARTIDPPRPIDPPRPIDPPRPIDPPRPIDPPRPNGTRTIEPPPQMQRTSTASSIGSSEGTSEQIKVASTISLIDFSADPEPSASVPPPQSTPTSQQQPASAQPVQPVNAPAQQPAVEQGKNVSSVSSGGGDWASFDSFGQQQTPQTGNSVDPLESALAQLSFSETPSAPNSSAFPASVMPTSVPNDGGSSMMGQSHSSFFGAPPGVSGHQASTGMSIHGSSVQQTGLAAPAAGLPFQVSANSRATSGIQEAAPNTDSRSIGRKELPADIFTSLYPPGPQTIGGWQRTPQFGMGYAMPYQTAMGMQAYPQMAFA

SEQ ID NO: 135 - DNA, 627 bp, Oryza sativa
atgttccagcgggataagaagaactacatggagtggcttgatacacattcagagaggtctgttgtttacatatcatttgggagcatactcacatatagcaagcgacaggtagacgagatattacacggcatgcaggagtgtgagtggccatttttgtgggtggtgcgtaaggatgggcgtgaagaagatttgagctatttggtggataacattgatgaccatcacaatgggatggtgatcgaatggtgtgaccaactagatgtgttgtcccatccctccgtgggatgctttgtcacacaatgcgggtggaactcgactttagaagccttggaacttggtgtgcccatggttgctgtgccgaattggtcagaccagcccacaattgcatatcttgtggagaaggaatggatggttggcactagagtgtatcgcaatgacgaaggagtaatagtggggacagagttggcaaagagtgtcaagattgtcatgggagacaatgaggtagcaacaaagataagagagagagtaaattctttcaaacataagatccatgaggaggcaataagaggtgaaacaggtcagaggagtctccaaatatttgccaagacaataatagaatcagattaa

SEQ ID NO: 136 - protein, 208 aa, Oryza sativa
MFQRDKKNYMEWLDTHSERSVVYISFGSILTYSKRQVDEILHGMQECEWPFLWVVRKDGREEDLSYLVDNIDDHHNGMVIEWCDQLDVLSHPSVGCFVTQCGWNSTLEALELGVPMVAVPNWSDQPTIAYLVEKEWMVGTRVYRNDEGVIVGTELAKSVKIVMGDNEVATKIRERVNSFKHKIHEEAIRGETGQRSLQIFAKTIIESD

SEQ ID NO: 137 - DNA, 444 bp, Oryza sativa
atgcatcaagtttgtttaagcgcaggtgtagccactggggacgcacttgccacagtagttgacaaggaggctcagcttcaccgggatgttgacgacgacgccgagcacgttggccttgatggccgtgcagaggcagacggcggcctcgaggtcggcgaggccgctgatgaggctgcagcacggctgggcgggcacctggccgacctcgccgctgatggcgcccagcacgtcggcgcaggccccgaacttgagcgtgttcacggggcacttgttatggtaggacggagtagttggagtcggaggcggcggcggcgggagggccgggggcggcggcgtcgggcatttgccgcacgcgcagccgcaggcattggccgtcgtgaagaagaggaggttgatggccaagagaaacacgaggatcttggatgccatggagcttatccttaa

SEQ ID NO: 138 - protein, 147 aa, Oryza sativa
MHQVCLSAGVATGDALATVVDKEAQLHRDVDDDAEHVGLDGRAEADGGLEVGEAADEAAARLGGHLADLAADGAQHVGAGPELERVHGALVMVGRSSWSRRRRRREGRGRRRRAFAARAAAGIGRREEEEVDGQEKHEDLGCHGAYP

SEQ ID NO: 139 - DNA, 729 bp, Oryza sativa
atggtgccgagggtggagcgcggcggcggcgggttccatctccccaacagcgagcgggaggactcgctgttcatccgcgcgctcatctccgtcgtgtccggtgacaccacggtgccgacgctgctgccggagccgacgatggcgaccgtggttgccggtgcggctacgtgcgccaggtgcggggtggacgggtgcatcggcgtggactgcgaggtggtggtgttggcggcggcggctggctcgagctgcagcgacgaggaggatgagggggagtgcaccacgggcgcggtggccagcggcggcgtgacgggcggcgtgggcaagaggaggccgcggaggcggagcggcggcgaggggagcaggtacaggggcgtgcggcgtcggccgtgggggaagtgggcggcggagatccgcgacccgcgccgcgccgtctgcaagtggctcggcacgttcgacaccgccgaggacgccgcgcgcgcctacgacgtcgccgcgctcgagttccgcggccagcgcgccaagctcaacttcccggcgtccacggccgcgcagcagccacgtccactcctccatcacaacctccgtgagaactgcggctcgaacgcgtcgtcgccggtgcacgcgccagagcacgcgaggacggcggcggcggcgaaggaccaggagatctgggacggcctacgggagatcatgatgctcgacgacggcagcttctggtccatgccatga

SEQ ID NO: 140 - protein, 242 aa, Oryza sativa
MVPRVERGGGGFHLPNSEREDSLFIRALISVVSGDTTVPTLLPEPTMATVVAGAATCARCGVDGCIGVDCEVVVLAAAAGSSCSDEEDEGECTTGAVASGGVTGGVGKRRPRRRSGGEGSRYRGVRRRPWGKWAAEIRDPRRAVCKWLGTFDTAEDAARAYDVAALEFRGQRAKLNFPASTAAQQPRPLLHHNLRENCGSNASSPVHAPEHARTAAAAKDQEIWDGLREIMMLDDGSFWSMP

SEQ ID NO: 141 - DNA, 519 bp, Oryza sativa
atgcagagccagatcgtgtgccatgggtgcaggaacattctgctctacccgagaggggcaccgagcgtttgctgcgcggtgtctcatgccgtgtccagcacagcaccgtctccaggaatggatatagctcatcttatatgtggtggatgccgaactttattgatgtatactcgcaatgcgacatctgttagatgttcgtgctgcgatacagtcaatcttgtcagaccagtgagtagtatagctcacttgaactgtggccagtgccagacagtgttgatgtatccataccgagcaccttctgtcaagtgtgctatctgcaattttattacaaatactgggatgaatacaatgagacatttgccaccaaatggaacttcatatactgccccatcaacctgtgctccaaccactcaatcacagaatgttactgttgttgttgaaaatcctatgacggtagatgcaaagggaaagttggtgagcaacgttgtagttggggttacaactggtggtaaaaagtaa

SEQ ID NO: 142 - protein, 172 aa, Oryza sativa
MQSQIVCHGCRNILLYPRGAPSVCCAVSHAVSSTAPSPGMDIAHLICGGCRTLLMYTRNATSVRCSCCDTVNLVRPVSSIAHLNCGQCQTVLMYPYRAPSVKCAICNFITNTGMNTMRHLPPNGTSYTAPSTCAPTTQSQNVTVVVENPMTVDAKGKLVSNVVVGVTTGGKK

SEQ ID NO: 143 - DNA, 855 bp, Oryza sativa
  misc_feature (391)..(391): n = any nucleotide
atgcgaggatggcaagaagtatggagcggagaacacttgcaccagcggaagcacgctgtcgaaggcggcgttgtgtttcgccaaagcacgctcactgatggagaaggagagagggaacctgctgaaagcactgggtactcaggtggcagaaccgtgagggctatggtgatgggagctccttttggagatgctcgccatcttgcccaaagatacgacaggatgcgtcaggaaaccgaagcacaggctattaaagtctcgaagcgccaaatgaaatttagagaaacatctgggaagggtgatatgatttcaagattagaggctgctgaatcaaagttgcaagagttaaagtcaaacatgggggttctaggcaaggaagccgttgcatcaatgnctgctgttgaagctcaacagcaaagactgaccttgcaacgactaattgcaatggtcgaatctgagagaagttatcaccagagggttctgcagattcttgatcaacttgaaagagagatggtatctgagcgccaaagaattgaaggagcacctcctccagctgttgagagttctatgccaccaccaccttcatatgaagaaattaacggtgttttcatgaggaatccaacagtcgctgaattggtggaaactgtggaattcttcttggctgaggccatccagtcttatcgtgctgagagtgaaactgagctcaacctggcagctggtgactatatagttgtccggaaggtgtcaaacaatggatgggcagaaggtgaatgcagagggaaagctggctggttcccttacgactacatcgagaaaagggaccgtgtgcttgcaagtaaagtcgcccaggtcttctag

SEQ ID NO: 144 - protein, 284 aa, Oryza sativa
  X_region (131)..(131): Xaa = any naturally occuring amino acid
MRGWQEVWSGEHLHQRKHAVEGGVVFRQSTLTDGEGEREPAESTGYSGGRTVRAMVMGAPFGDARHLAQRYDRMRQETEAQAIKVSKRQMKFRETSGKGDMISRLEAAESKLQELKSNMGVLGKEAVASMXAVEAQQQRLTLQRLIAMVESERSYHQRVLQILDQLEREMVSERQRIEGAPPPAVESSMPPPPSYEEINGVFMRNPTVAELVETVEFFLAEAIQSYRAESETELNLAAGDYIVVRKVSNNGWAEGECRGKAGWFPYDYIEKRDRVLASKVAQVF

SEQ ID NO: 145 - DNA, 1509 bp, Oryza sativa
atggcggccagcagccggcatgggccattcatcaattggagtgatgggctcttcctcttcttgtcttcttcttcctcgaggaatcgcttcctgagagtgttcttgccgttcccggatccgtcgacgatgatggctggtctcgaggttgccacgacagcggtgaccggcggcgacgctagcctggttgtcgtcgtcggcgttctgttcttgatggtcgccgttgttgtgatgacgaggttgggtgatggaggtgcggcgccgagcccgccggcgatgccggtgctcggccacctgcacctgatcaagaagccgctgcaccgctcgctggcggaggtcgccgcgcgggtgggggcggcgccggtgtgtcgtcggctgcggctgggcgcgcggcgggcgctgctcgtgtcgacgcacgccgcggcggaggagtgcttcacggcgtgcgacgccgcggtggcggggaggccgcggctgctcgccggggacgtcctcgggctgttcgagctggtgctcaacgtgatgctgcgcgcggtgaccgcgcgccgccacgccggcgacgagacgcgcaggttccaggagatcgtcgaggagacgttcgcggcgagcggctcgccgaccgtcggcgacttcttcccggcgctccggtgggtcgaccgtctccgcggcgtcgtggccaccctacaaagccttcagaaaaggcgcgacgcgttcgtcgccggcctcgtcgacgaccaccgccgaacacgccgcgccgccgccgccgccgccgacaaggatcagaagaagaacggcatcatcgacgccctcctcacgctgcaagaaaccgaccccgaccactacaccgacaatgtcgtcaagggcatcgtcctggtgctgctcaccgccggcaccgacacgtcggcgctgacaacggagtgggcgatggcgcagctggtggcgcacccggaggcgatgacgaaggtcagggccgagatagacgccaacgtcggcgcggcgcggctggtggaggaggccgacatggcgagcctcccctacctccagtgcgtcgtcaaggagaccctccggctccgccccgtcggcccggtgatcccggcgcacgaggccatggaggattgcaaggtgggtggctaccatgtccggcgtggcacgatgatcctcgtgaacgcgtgggcgatccaccgcgacggcgatgtctggggctcgccggaggagttcaggccggagcggttcatggacgacggcgccggcgccggcgcggtgaccgcggtcaccgcgcccatgctgccgttcgggctcggccggcggcggtgccccggcgaggggctcgccgtgcgcctcgtcggcctgacggtggcggcgctcgtgcagtgcttcgattgggagatcggcgaaggcggcgccgtcgacatggccgaaggcggcgggttgacgatgccaatggcgacgccattggcggctgtctgccggcctcgagagtttgtcaagactgtggtgtctgattgcttctga

SEQ ID NO: 146 - protein, 502 aa, Oryza sativa
MAASSRHGPFINWSDGLFLFLSSSSSRNRFLRVFLPFPDPSTMMAGLEVATTAVTGGDASLVVVVGVLFLMVAVVVMTRLGDGGAAPSPPAMPVLGHLHLIKKPLHRSLAEVAARVGAAPVCRRLRLGARRALLVSTHAAAEECFTACDAAVAGRPRLLAGDVLGLFELVLNVMLRAVTARRHAGDETRRFQEIVEETFAASGSPTVGDFFPALRWVDRLRGVVATLQSLQKRRDAFVAGLVDDHRRTRRAAAAAADKDQKKNGIIDALLTLQETDPDHYTDNVVKGIVLVLLTAGTDTSALTTEWAMAQLVAHPEAMTKVRAEIDANVGAARLVEEADMASLPYLQCVVKETLRLRPVGPVIPAHEAMEDCKVGGYHVRRGTMILVNAWAIHRDGDVWGSPEEFRPERFMDDGAGAGAVTAVTAPMLPFGLGRRRCPGEGLAVRLVGLTVAALVQCFDWEIGEGGAVDMAEGGGLTMPMATPLAAVCRPREFVKTVVSDCF

SEQ ID NO: 147 - DNA, 1767 bp, Oryza sativa
atggagaaggtgggcgggaagccgccgcagtcgcgcctctgcttcctcgccacgctctgcgccatgttctgggtcctcatcttctacttccacttcttcgtcatcgccaacgagcctggctccgcgggggcggacaccgccgccggcgccgcggcgagcattgcccgcgcagaacttccgctccccgaacccgagcgcgtctccgatcccgcggttcccctccctccgcctgccctcgtctcggagccgccacctaccaccgctactgtcgccaaagtggaagatgaggagaagcccacggccgtcgcccaccaggaggcggcgcccagggattacgcgttccagcgagcgctcaagaccgcggagaacaagagcgacccgtgcggcggccggtacatctacgtgcacgagctgccgccgcggttcaacgacgacatgctccgggagtgcgagaggctcagcctctggaccaatatgtgcaagttcatgagcaacgaagggcttggtccgccgttgggcaacgaggaaggggtgttctccaacaccggctggtacgcgacgaaccagtttatggtggatgtcatcttcaggaaccggatgaagcagtacgagtgcctgaccaaggactcgtccatcgctgccgcggtgtttgtgccgttctacgccgggtttgatgtggcgaggtatctttgggggcacaacatttcgacgagggatgccgcgtcgctggatttgatagattggctgaggaagaggcctgaatggaatgtgatgggcgggcgtgaccatttcttagttggcggcaggattgcgtgggatttcaggcgcttgacggacgaagagtcggattggggcaacaagctgcttttcatgccggctgcgaagaatatgtcgatgttggtggtggagtcaagcccatggaatgccaatgattttgcgataccatatcctacttacttccaccctgccaaggatgctgatgttttgctttggcaggatagaatgaggagcctggaacgaccatggttgttctcgtttgctggggctcctcgtcctgatgatcccaagtctatcagaagtcagcttattgatcaatgcaggacatcaagtgtctgtaaattgctggagtgtgatcttggggagagcaagtgccattcccctagcgcaatcatgaatatgttccagaactctttgttctgcttgcagccccaaggtgattcgtatacgagaagatctgccttcgactcgatgctggctggttgcattcctgttttctttcatcctggttcagcgtatgtccaatatacgtggcatcttccgaagaactatacacggtactctgtcttcatccctgaagatggcgtccgtaagggaaatgtcagcattgaggacaggcttaaaagtatccatccagatatggtcaagaagatgagggaagaggtcattagtctcatcccaagggtgatatatgctgatccaaggtcaaagctggagaccctgaaggatgcattcgatgtttctgtagaggcaataattaacaaggtgacacagttgagaagagatatcatcgaagatcatgaagataaagattttgttgaagagaatagctggaagtatgatctgttggaagaagggcagaggacaattgggcctcatgaatgggacccgttcttctctaagcccaaggacaagggtggagattctactaatccatctactaatgctgccaagaactcctggaaaaacgaacaaagaggtcagaactaa

SEQ ID NO: 148 - protein, 588 aa, Oryza sativa
MEKVGGKPPQSRLCFLATLCAMFWVLIFYFHFFVIANEPGSAGADTAAGAAASIARAELPLPEPERVSDPAVPLPPPALVSEPPPTTATVAKVEDEEKPTAVAHQEAAPRDYAFQRALKTAENKSDPCGGRYIYVHELPPRFNDDMLRECERLSLWTNMCKFMSNEGLGPPLGNEEGVFSNTGWYATNQFMVDVIFRNRMKQYECLTKDSSIAAAVFVPFYAGFDVARYLWGHNISTRDAASLDLIDWLRKRPEWNVMGGRDHFLVGGRIAWDFRRLTDEESDWGNKLLFMPAAKNMSMLVVESSPWNANDFAIPYPTYFHPAKDADVLLWQDRMRSLERPWLFSFAGAPRPDDPKSIRSQLIDQCRTSSVCKLLECDLGESKCHSPSAIMNMFQNSLFCLQPQGDSYTRRSAFDSMLAGCIPVFFHPGSAYVQYTWHLPKNYTRYSVFIPEDGVRKGNVSIEDRLKSIHPDMVKKMREEVISLIPRVIYADPRSKLETLKDAFDVSVEAIINKVTQLRRDIIEDHEDKDFVEENSWKYDLLEEGQRTIGPHEWDPFFSKPKDKGGDSTNPSTNAAKNSWKNEQRGQN

SEQ ID NO: 149 - DNA, 2271 bp, Oryza sativa
atggagaacactaccaagggcaaggtgtgtgtcactggggcttctggctatgttgcctcttggcttgtgaagcgacttcttgagtcagggtatcatgttcttgggacagtcagagacccaggcaatcacaagaaagtagggcacctgtggaatttaacaggtgcaaaggaaaggctggagcttgtgagagctgacctcttggaagaagggagctttgatgatgctgtgatggcttgtgagggtgtcttccatactgcatcacctgtcatcaccgaaactgactccagcaaggcatgctacactaactgtgaagaccactttcaccctgcaattatgcgactctcctttttatcttggaattcagatttaagatgccatctggttgcagcagtgcttgattcagcgataaacggcaccctgaacgttctgagatcatgcaagaagaacccatccctcaagagggtagtcctcacctcttcatcatcaaccgtgaggctcaaagatgaagctgatctgccacccaacgtgttgctggatgagacatcatggagctccatggagttctgcgagagtctccagatatggtacgccattgccaagacacttgcagagaaggcagcctgggagttcgccaaggagaacggcatcgaccttgtggctgttcttccaaccttcgtggttggacccaatctgtctcatgaattaagtcccactaccaccgatgtcctcggcctattccaaggtgagacaacgaagttcaccatgtacgggaggatggggtacgtccacatcgacgatgtcgcgagctgccacatcctgctctacgagacaccccgtgcagccgggaggtacatctgcaactcggctgtcctggacgtcaacgaactggtcaccttgctcgctaggcgattcccttcgtaccccatcccaaagagtttgccgtgcgtttacggggagcagacttatggtttcagcacggccaaggtgagggagctgggcatgaagttcagagatgtggaggagatgttcgacgacgccgtcgactcgctcagagctcacggctacctgctgaacagcattccgagacgtaatcaagcaggaggacaaagtcatagagataagccgtttttagcgcactcgcttgctcaggttcctcctcatcttcttctctcctcttatccccttcgccttcctcctccccgcctacacgaccagttcctggtttctgctgccttccctcggtctggatcaacaagaggaggtcgtccaatggcgagtggtgggagcagcaatgccgggagcctgacgcagtggctgagggagaaggggttcgacgaggaggccatcgggcggatgtcgagacggtgcaagaaccttcacggccttgacgccggcgaggcctccggggtgtgggactacctcctgaacgtcgtcaagatcgagcggcggaagctccggtacgtggtcaccaagtgccccaaggtgctcaccctgtccgtcgacgacaagctcgtccccacggtgcagtgcctcaccacgctgcaggctaagcccggcgaggttgcgcaggccattgtcaagttcccccagatactgttccacagcgtggaggagaagctctgccctctcctcgccttcttccagacgcttggcatctctgagaagcagctcgccaagctgctcatggtcaacccgcgcctcatcagctacagcattgaggccaagttctcgcagaccgtcaacttcctcgttggccttggcattgacaaggagggtatgatcggcaagatcatggcaaaggagccctacatcatgggttacagtgttgacaagcgccttcgtcctactgccgagttcctcaagtcggcggtcgggcttgaggggtcaaatcttcagagggtgatcatgagttttcctgatattttgtcgcgagatgtcgataagattctgcggcccaatttggcgttcttacagagctgcggtttcagcaaggatcaggtcatggcattggtggctggataccctcctgttctcatcaagagtgtcaagcattgcctggagcctaggatgaagttccttgttgaagaaatggggcgggacatgggtgaggtggtggattacccccagttctttcgccatggtctcaagaggagcctggagtaccgccacaaggtgctcaagcagatgaattcaaggtgcagcctcagtgagatgcttgactgtaatcagaagaagtttgccatgaaatttggtttgcttgcagcagtttag

SEQ ID NO: 150 - protein, 756 aa, Oryza sativa
MENTTKGKVCVTGASGYVASWLVKRLLESGYHVLGTVRDPGNHKKVGHLWNLTGAKERLELVRADLLEEGSFDDAVMACEGVFHTASPVITETDSSKACYTNCEDHFHPAIMRLSFLSWNSDLRCHLVAAVLDSAINGTLNVLRSCKKNPSLKRVVLTSSSSTVRLKDEADLPPNVLLDETSWSSMEFCESLQIWYAIAKTLAEKAAWEFAKENGIDLVAVLPTFVVGPNLSHELSPTTTDVLGLFQGETTKFTMYGRMGYVHIDDVASCHILLYETPRAAGRYICNSAVLDVNELVTLLARRFPSYPIPKSLPCVYGEQTYGFSTAKVRELGMKFRDVEEMFDDAVDSLRAHGYLLNSIPRRNQAGGQSHRDKPFLAHSLAQVPPHLLLSSYPLRLPPPRLHDQFLVSAAFPRSGSTRGGRPMASGGSSNAGSLTQWLREKGFDEEAIGRMSRRCKNLHGLDAGEASGVWDYLLNVVKIERRKLRYVVTKCPKVLTLSVDDKLVPTVQCLTTLQAKPGEVAQAIVKFPQILFHSVEEKLCPLLAFFQTLGISEKQLAKLLMVNPRLISYSIEAKFSQTVNFLVGLGIDKEGMIGKIMAKEPYIMGYSVDKRLRPTAEFLKSAVGLEGSNLQRVIMSFPDILSRDVDKILRPNLAFLQSCGFSKDQVMALVAGYPPVLIKSVKHCLEPRMKFLVEEMGRDMGEVVDYPQFFRHGLKRSLEYRHKVLKQMNSRCSLSEMLDCNQKKFAMKFGLLAAV

SEQ ID NO: 151 - DNA, 441 bp, Oryza sativa
atggaaatggctcatctaatatgtggtggttgccgaacattgctgatgtatactcgcaatgcggacactgtgagatgttcatgttgcagtacagtcaatcttgttagaccagtgaataatatagcacatgtgagctgtggccagtgccggacgactttgatgtatccatatggcgcaccttctgtcaaatgtgccatatgccattatatcacaaacaccggaatgaatactgtggcacccacgccatctccaatgcctacatcaagtggatcttcatataatgcccccccaagtggatcttcatataatgcccccccaccaacttcagctcccacatctcgaccccagaatgtaaccgttgttgtcgagaaccctatgactgttgatgaaaagggtaaactggttagcaatgttgtagttggagttacaactgggaaatag

SEQ ID NO: 152 - protein, 146 aa, Oryza sativa
MEMAHLICGGCRTLLMYTRNADTVRCSCCSTVNLVRPVNNIAHVSCGQCRTTLMYPYGAPSVKCAICHYITNTGMNTVAPTPSPMPTSSGSSYNAPPSGSSYNAPPPTSAPTSRPQNVTVVVENPMTVDEKGKLVSNVVVGVTTGK

SEQ ID NO: 153 - DNA, 1042 bp, Oryza sativa
atggaggccatccggaagcaggcgtccaagctccgggagcaggtcgcccggcagcagcaggccgtgatgaagcagttcgggggcgggtacggcgcggacggcgcgttcgccgacgaggccgaggcgcagcagcactccaagctcgagaagctctacatctccacgcgcgccgctaagcacttccaaagggacatagttcgcggggtggagggatacattgtcacagggtcgaagcaggtcgaaatcgggtaataagttatgcgaggatggcaagaagtatggagcggagaacacttgcaccagcggaagcacgctgtcgaaggcggcgttgtgtttcgccaaagcacgctcactgatggagaaggagagagggaacctgctgaaagcactgggtactcaggtggcagaaccgttgagggctatggtgatgggagctcctttggaagatgctcgccatcttgcccaaagatacgacaggatgcgtcaggaagccgaagcacagcaggctattgaagtctcgaagcgccaaatgaaattaagagaaacatctgggaatggtgatatgatttcaagattagaggctgctgaatcaaagttgcaagagttaaagtcaaacatgggggttctaggcaaggaagccgttgcatcaatgactgctgttgaagctcaacagcaaagactgaccttgcaacgactaattgcaatgatggtatctgagcgccaaagaattgaaggagcacctcctccagctgttgagagttctatgccaccaccaccttcatatgaagaaattaacggtgttttcatgaggaatccaacagtcgctgaattggtggaaactgtggaattcttcttggctgagggtgactatatagttgtccggaaggatgggcagaaggtgaatgcagagggaaagctggctggttcccttacgactacatcgagaaaagggaccgtgtgcttgcaagtaaagtcgcccaggtcttctaggcgttcaatgagccatacatacataaccctggtgttgtacactgtattatga

SEQ ID NO: 154 - protein, 64 aa, Oryza sativa
  X_region (22)..(23): Xaa = any naturally occuring amino acid
WRPSGSRRPSSGSRSPGSSRPXXSSSGAGTARTARSPTRPRRSSTPSSRSSTSPRAPLSTSKGT

SEQ ID NO: 155 - DNA, 1182 bp, Oryza sativa
atgccatggcattctggagtgcgtgagtctcgaggcaaatctggatgcttccaacccccaccatccccaccacctccctcctcgatccctcgcctcggaggccgcaggtccaagcctctgctgcatttggcgttcaaggaggataagcaccttgttttccctttgcacgaactgttcttagattgcaaggaaaagtttcacctttatttgcgacctcaattagctgagcaccttgccaatgttctctttgtgcgttgcgtgcctgatttcccatacggagaccgggcagtatttgagcggttgtctcccgaggaagaggagggattgctagtgttcttttttgcagttccaatggatgctaagggtgttaatgaccgggatgctctaattgatctggagagtggaaataacattgttgtcggcgagcataacaacggggcggatgccaattttgctgttgcccaagaaagaacagcaccgaatggttcatggaatggtgccatgggcaccaatggatgcctgaaagatgatgtaaatcatcagcacatgtgttgctgtctgtcctctccagatgctgctgccaaaaatggagatgaccggaagtctgatggggaggagaagctgggccttctggatacttccggaggcgagaaaacaaagaagaagcggtccaagaagccaccgcgaccaccacggccaccaacacccacgccattggatgtttccgaccagaagctcctcaatgagctgagtgaacttgctatattgaaacgggcaaggattgagcggatgaaggctttgaagaagatgaagaacgccaaacatgggtcttcaagtggcaacttgtttcccctgatcattaccattatcttctgcctcgtcatactctggcaaggttttttctcacgaacggggtcggctgtgagcttccatggatcacctgaatcgtccgttagagcgcatagcagtctgatctccattcggttctacaagaacaataattctaatagcagatctcgagaggccatatcggcagctcccaagagggatctctctgtggatggattccagatctgcacagtatacagcacgcgtgtgtggtctgatgttaattcccacatggcattgcttgctgatcgtccagctacactgttgagctggactggactggactctgcttga

SEQ ID NO: 156 - protein, 393 aa, Oryza sativa
MPWHSGVRESRGKSGCFQPPPSPPPPSSIPRLGGRRSKPLLHLAFKEDKHLVFPLHELFLDCKEKFHLYLRPQLAEHLANVLFVRCVPDFPYGDRAVFERLSPEEEEGLLVFFFAVPMDAKGVNDRDALIDLESGNNIVVGEHNNGADANFAVAQERTAPNGSWNGAMGTNGCLKDDVNHQHMCCCLSSPDAAAKNGDDRKSDGEEKLGLLDTSGGEKTKKKRSKKPPRPPRPPTPTPLDVSDQKLLNELSELAILKRARIERMKALKKMKNAKHGSSSGNLFPLIITIIFCLVILWQGFFSRTGSAVSFHGSPESSVRAHSSLISIRFYKNNNSNSRSREAISAAPKRDLSVDGFQICTVYSTRVWSDVNSHMALLADRPATLLSWTGLDSA

SEQ ID NO: 157 - DNA, 416 bp, Oryza sativa
atggggagcagggtgaaggaggaggagaggaacgagagggccatccgggccctgctcaagctgcccggcaaccgccgctgcatcaactgcaacagcctgggaccacaatacgtatgcacaagcttctcaactttcgtctgtgttagttgcagcggaatacaattactgaactttaattattcttcagtcgggagttcactcatcgtgtaaaatcaatatcaatggctaaatttacttctcaagaagtttctgctcttcaagaagggggaaacgagcagcgtggtaaggaaatatatttgaaacattggaggctcagaaacttcatcaagattgtatatgttgaccgaaggttcacagcagaaagaattggtaaccatcaaccacaagcgaaggtatttgtcattggcttgcgctag

SEQ ID NO: 158 - protein, 137 aa, Oryza sativa
MGSRVKEEERNERAIRALLKLPGNRRCINCNSLGPQYVCTSFSTFVCVSCSGIQLLNFNYSSVEFTHRVKSISMAKFTSQEVSALQEGGNEQRGKEIYLKHWRLRNFIKIVYVDRRFTAERIGNHQPQAKVFVIGLR

SEQ ID NO: 159 - DNA, 768 bp, Oryza sativa
  misc_feature (329)..(329): m = adenine or cytosine
atggcgggcagcaccaagctgcggccattcctcctgacgctgctcctcctcctctccaccaccgtggcttccatcctcgcggagtacgacccggaatgcgactgcgacaagcccaagcaccccaagccctcgcacccttctccctctcccggccaccccaagggccccaagaaccctacccctcgcccccccaagggccccacctacccgtctccggtcacccgcccgccgccgctcgtcgcccctcccaaggtccccgtcacccacccgccgaagggccccgtcacccgtccgccgccggtcacctaccccacacctccggtcaccamccccccggtcgtcgtcggcccgccggtcacctaccccatacctccggtcaccacccctccggtcgtcgtcggccctccggtcacctacccgacgccgccggtgacatacccgacgccgccggtgacgtacccgacgccgccgacgacgacgccgtgcccgccgccgccgccggcgacgcagaggtgcccggtggactcgctgaagatcggggcgtgcgtggacctgctgggggggctggtgcacgtggggatcggcgacccggtggtgaacaagtgctgcccgctgctggaggggctcgtggagctggaggccgccgtgtgcctctgcaccaccatcaggctcaagctcctcaacatcaacatctacctgcccctcgcgctccagctcctcctcacctgcggcaagaaccctccccccggctacacctgctccatctag

SEQ ID NO: 160 - protein, 255 aa, Oryza sativa
MAGSTKLRPFLLTLLLLLSTTVASILAEYDPECDCDKPKHPKPSHPSPSPGHPKGPKNPTPRPPKGPTYPSPVTRPPPLVAPPKVPVTHPPKGPVTRPPPVTYPTPPVTSPPVVVGPPVTYPIPPVTTPPVVVGPPVTYPTPPVTYPTPPVTYPTPPTTTPCPPPPPATQRCPVDSLKIGACVDLLGGLVHVGIGDPVVNKCCPLLEGLVELEAAVCLCTTIRLKLLNINIYLPLALQLLLTCGKNPPPGYTCSI

SEQ ID NO: 161 - DNA, 824 bp, Oryza sativa
atggggaggggcaggattgagatcaagaggatcgagaacacgacaagccgccaggtgaccttctgcaagcgccgcaacggacttctcaagaaggcgtatgagctctccgtcctctgcgatgccgaggtggctctcatcgtcttctccagccgtggccgcctctacgagtactccaacaacaacaatgtgaaggctacaattgacaggtacaagaaggcgcatgcttgtggctcaacttctggtgcacctctcatagaggtcaatgctcagagcaatactaccagcaggagtctgccaaactgcgccaccagattcagatgctgcaaaacaccaacaaaaggcacctggttggcgataatgtgagcaacctgtcactgaaggagctgaagcaacttgaaagccgcctggagaaaggcatttcaaagatcagagccaggaagagaatgaactgctggcttcagagatcaattacatggccaaaaggggagattgagcttcagaacgacaacatggacctcagaaccaagcagattgctgaggaggagcagcagctgcagcaggtgacggtggcccggtcggccgccatggagctgcaggctgcggcggcggcgcagcagcagcagcagaatccgttcgcggtggcggcggcgcagctggacatgaagtgcttcttcccgttgaacctgttcgaggcggcggcgcaggtgcaggccgtggcggcgcagcgccagcagatcatccccaccgagctcaacctcggctaccaccaccaccttgccattcccggcgccgccgccgccgacgcgccgcctcctcacttctga

SEQ ID NO: 162 - protein, 274 aa, Oryza sativa
  X_region (91)..(91): Xaa = any naturally occuring amino acid
  X_region (148)..(148): Xaa = any naturally occuring amino acid
MGRGRIEIKRIENTTSRQVTFCKRRNGLLKKAYELSVLCDAEVALIVFSSRGRLYEYSNNNNVKATIDRYKKAHACGSTSGAPLIEVNAQXQYYQQESAKLRHQIQMLQNTNKRHLVGDNVSNLSLKELKQLESRLEKGISKIRARKXNELLASEINYMAKREIELQNDNMDLRTKQIAEEEQQLQQVTVARSAAMELQAAAAAQQQQQNPFAVAAAQLDMKCFFPLNLFEAAAQVQAVAAQRQQIIPTELNLGYHHHLAIPGAAAADAPPPHF

SEQ ID NO: 163 - DNA, 737 bp, Oryza sativa
atgaagttaaggccaaaaagacctggatggaagtcacttatgcctctgcagttgagcaggaaatctgcactgcgtttctttttgtttcccaaggttcaggctgcgggtcaatctccagatgacacaccagtttatcttaatgtgtatgatttaacacccatgaatggctatgtatattgggcaggccttggtatatttcactccggaattgaaggttcatggtgttgaatatgcatttggagcacatgactacccctcaagtggagtatttgaagtagagcctcgtcaatgccctggtttcagattcaggaaatcgatatttctcggtacaacatgcttagatcccattcaagttaggcaattcatggagctacagtcagtgaactacaatggagatacttaccaccttatcacaaagaactgcaaccacttttgcaaggacatgtgttacaaattgactggtaacaaaattccaaaatgggtaaatcgcctcgccagaatagtgcaactgccttctgccagaatcactcaagatatccccagtcggccatgatccaaacagtcgacctgaagattgtgagaaaaggcggctgaggaacccgttgagctgcttctcttcgatctcgagccagaggcagctgcccccatcttccccgttcccgacatcacctgtgaaagagcctcttgcgtacagttcatcaaggaaatccagcgctccatcactgaggaataggtag

SEQ ID NO: 164 - protein, 28 aa, Oryza sativa
SGTGKMGAAASGSRSKRSSSTGSSAAFS

SEQ ID NO: 165 - DNA, 507 bp, Oryza sativa
atggctttcgcgagcgcaagcaacggggcggtcaggttcaccgaggagcaggaggcgctggtgctcaagtcgtgggctatcatgaaggacgattccgccaacatcggccaccgcttcttcttgaagatcttcgaggtcgcgccgtcggctcgccatctgttctcgttcctgcgaaactccgatgtgccgctcgagaagaaccccaatctcaagaaacacgccatggccgtcttcgtcatgacgtgtgaggcggctgcgcagctgcggaaaaccgggagggtcaccgtgagggacaccaccatcaagaggctgggctccacgcacttcaagaacggcgtctccgacacccacttcgagcaggtggcgaggttcgcgctgcttgagacgatcaaagatgggattccggcgagcatgtggagccccgagatgaaaaacgcgtggggcgaagcctacgagcacctggttgcggccatcaaggaggggatgaagccggtcgctctgttataa

SEQ ID NO: 166 - protein, 168 aa, Oryza sativa
MAFASASNGAVRFTEEQEALVLKSWAIMKDDSANIGHRFFLKIFEVAPSARHLFSFLRNSDVPLEKNPNLKKHAMAVFVMTCEAAAQLRKTGRVTVRDTTIKRLGSTHFKNGVSDTHFEQVARFALLETIKDGIPASMWSPEMKNAWGEAYEHLVAAIKEGMKPVALL

SEQ ID NO: 167 - DNA, 1005 bp, Oryza sativa
atggcggcggcggcttcggtggtggtgttgtgcgcgctggtcgtcctcgcggcggcggggggcgcgagcgcttggccggtgatgagcccgtcgtactacgaggcgtcgtgcccaagcgtgtacgacatcgtgcggcgcgtcgtccaggatgcgcgctgcaccgacccgcgcgcccccgccagcctcctccgcctccacttccacgactgcttcgtcaatgggtgtgacgggtcgctgctgctcgacgacttcggcgcgatgcagagcgagaagaacgcgcccccgaacaaagggtcggcgcgtgggttcgacgtggtggacggcatcaaggctgccctggagaacgcctgccccggcgtcgtctcctgcgccgacatcctcgccctcgccgccgagatctccgtcgagctgtcaggagggccgagctggaacgtgatgctggggaggagggacggcacggcggcgaacttcgagggcgccagagacctccccggaccgacggacgatctggacctcctgagacggaaattctccgaattcaacctcgacgacaccgacttcgtcgctctccagggcgcgcacaccatcgggagggcgcagtgcaggttcttccacgaccggctctacaacatcagcggcacggagcagccggaccagacgctggacatggcctacctcaacgagctccggcagagctgcccggcgagcgaccccgaaagcgcggcgctgcgcaacctcgacccgcccacgccggacgcgttcgacaatagctactacggcaacctcctgcgcaaccgcggcctgctccagtccgaccaggggatgctctccgcgccgggcggcgccgcctcgaccaccgcgcccatcgtcgtgtggttcgccggtagccaggacgacttcttcaggagcttcgcgacggcgatggtcaagatgggcaacatcagcccgctcaccgggagcatgggggagatcaggaggaactgcagggtggtcaaccgcggctga

SEQ ID NO: 168 - protein, 334 aa, Oryza sativa
MAAAASVVVLCALVVLAAAGGASAWPVMSPSYYEASCPSVYDIVRRVVQDARCTDPRAPASLLRLHFHDCFVNGCDGSLLLDDFGAMQSEKNAPPNKGSARGFDVVDGIKAALENACPGVVSCADILALAAEISVELSGGPSWNVMLGRRDGTAANFEGARDLPGPTDDLDLLRRKFSEFNLDDTDFVALQGAHTIGRAQCRFFHDRLYNISGTEQPDQTLDMAYLNELRQSCPASDPESAALRNLDPPTPDAFDNSYYGNLLRNRGLLQSDQGMLSAPGGAASTTAPIVVWFAGSQDDFFRSFATAMVKMGNISPLTGSMGEIRRNCRVVNRG

SEQ ID NO: 169 - DNA, 2820 bp, Oryza sativa
  misc_feature (1069)..(1069): w = adenine or thymine
  misc_feature (1079)..(1079): k = guanine or thymine
  misc_feature (1080)..(1080): m = adenine or cytosine
  misc_feature (1084)..(1084): r = adenine or guanine
  misc_feature (1085)..(1085): s = guanine or cytosine
  misc_feature (1087)..(1087): y = cytosine or thymine
  misc_feature (1088)..(1088): b = cytosine, guanine, or thymine
  misc_feature (1091)..(1091): k = guanine or thymine
  misc_feature (1097)..(1097): m = adenine or cytosine
atgttgcagagcaagaccttcgtgaagaagacgagggcaggccgcgtccagaagaggtggtcagggagcactacctccgcgacgacatctcctgcggcgccgcctcctgctccacctgtggcgcggtcgagcacccgctctccgccgacgcggccgccatcctcgtcgtcgacaccaacgtcgtgctccaccagttgctgcagatcgatttgctggagaatccagcgattgacgatgttgtcctactatcggttgtgttggatgaggtgaagaataaaaacctcgcagtgttcaacaggatcaaggccctgtgttctaacaaggcaaggaggttcttcgtgttcaccaatgagcaccacagacagggatacatatgtcaaagagatggttggagagagcccgaatgatcgcaacgatagagagctattcgtgtggctactcgttggtaccaaagtcatcttggtgagaatgtgaaagttttgctgatcacaaatgatagagataacaaacggaaagctattgaagaaggcattaatgctgagacagcagtggaatcatatgtacgatctcttgcacagcctggtttgctcgatttagtggttgtttcaactagtggagatgtcacaatggaagatgtagaagatcttagaccgtccaaaaagaaaagcacaaacctatgtcagaaattacagctggcctgcggtgtggaatttatcatcaagggaagctccgagttaatcgttacaatccatttgaagcttacgttggaagtgagagcattggtgatgagattgttattcatggccgttcaaacatgaatagggcttttgatggagacatagttgctgttgagctcttgccacaagatcaatggcatgaatcgaagtcatttattgcagacgacgatggaagatgatgaagaagacgtccatttgggctcccaaatagtgctgatgatgctccacggaaaggccaatgcccagcacaatgcaagcaggctggcatgcatgcagctgattgctgtctctagtgcgcccagttggaacgtgttgttggtataatcaagcgwaagtggaatkmgtarstybttkataagmtagggatatgtttttgtattgtgggtccttggagccaatgcccatgcctgctggtagtggaggcgttgctcatgctctatttgtgtctaaagatcgacgaatcccaaagattcgaattcaaactagacagcttggcaatcttctggacaaaaggattattgttgcagttgattcatgggatgtcttgtctcgatacccatcaggacattatgttgtcttaatagagaatgatatcaacacaagacctttctctacacaagtccttgcttgtttgccaccattgccatggacattatcacctgaagatcttgctaatcctaatagacaagatttacgccatgtgagagtctttagtgtggatccgcctgggttgtagggatattgatgatgcgctacattgcacgccactcccaaatgggaattttgaagttggagttcgtatcatattgctgacgtcactaactttgttcatcctggtactcctcttgatgaggaggcctcacaaaggggcacttctgtatatcttgttggacagcgaattgacatgcttccaaagcctcttactgaagagatgtttgttctcttcgtgctgatgttgagagattggcgttctctgtcatttggggaaatgacacctcatgctgatatcatatccacaagatatacaaagagtgttatcaagtcttgcgctgcaatgtcttatgtggaagctcaagcaagaatggatgacagcagccgtttggtcgatcccctaactgtagacctgcggaacttaaactcgttagcaaagagattatgaggcatcggcgttgtgaaagaggggctctaacacttgcttcagcagaagtcaaattcgaaattgatagtgaaacccatgatccgcttgacatagaggaatatatcaaattcgtgaggcaaatcaaatgattgaagagtttatgttggctgcaaatatctctgtcgctgagaagattttgaagcacttccccttgtgttcattgctaagttaaccaggcgccatcctagcccaacaaaggagatgcttgagccattactccgaactgcgtcttctgtggggctaaatctggatgtgtcatcctcaaaagcattagcagaatcacttgataatgcaaagagaatgatgacccatacttcaacaagcttatcaggattttggcaactagatgcatgacacagacacaggcagtttatttctgtagcggagacttgaccttttctgagtattaccattatggccttgctgcttctctttacacacatttcacctcccctattcgcagatatgcagcagatgttattgttcataggttgttagctgctgccctagaaattgccaaacttccacccctctttcaggatggtccacaacttacaggcgtagctgacaacttgaattatagacatcgaaatgcccagatggcaagcagagcatcagttgagcttcataccctcatatatttcaggacaagaggtttggcatagaagggcccatctaccttactccaaagggagacaaggggggtgattgggtagtagatgaggtgcaccagagagtaaccaagcccgggacaaacgtcagttacgctgtcctgcagaccgttatgattcatatggagaggcaggcagaacgatgaagcgtatcatcgttcatcacgaccgatatgactatcagaggtttcatagccgtcctttctttgcctag

SEQ ID NO: 170 - protein, 941 aa, Oryza sativa
  X_region (343)..(343): Xaa = any naturally occuring amino acid
  X_region (360)..(363): Xaa = any naturally occuring amino acid
  X_region (365)..(366): Xaa = any naturally occuring amino acid
  X_region (513)..(513): Xaa = any naturally occuring amino acid
  X_region (555)..(555): Xaa = any naturally occuring amino acid
  X_region (630)..(630): Xaa = any naturally occuring amino acid
  X_region (665)..(665): Xaa = any naturally occuring amino acid
  X_region (703)..(703): Xaa = any naturally occuring amino acid
  X_region (745)..(745): Xaa = any naturally occuring amino acid
MLQSKTFVKKTRAGRVQKRVREHYLRDDISCGAASCSTCGAVEHPLSADAAAILVVDTNVVLHQLLQIDLLENPAIDDVVLLSVVLDEVKNKNLAVFNRIKALCSNKARRFFVFTNEHHRQRDTYVKEMVGESPNDRNDRAIRVATRWYQSHLGENVKVLLITNDRDNKRKAIEEGINAETAVESYVRSLAQPGLLDLVVVSTSGDVTMEDVEDLRPSKKKSTNLCSEITAGLRCGIYHQGKLRVNRYNPFEAYVGSESIGDEIVIHGRSNMNRAFDGDIVAVELLPQDQWHESKSFIADDDGRDERRRPFGLPNSADDAPRKGQCPAQCKQAGMHAADCCLXCAQLERVVGIIKRKWNXXXXIXXRDMFLYCGSLEPMPMPAGSGGVAHALFVSKDRRIPKIRIQTRQLGNLLDKRIIVAVDSWDVLSRYPSGHYVVLIENDINTRPFSTQVLACLPPLPWTLSPEDLANPNRQDLRHVRVFSVDPPGCRDIDDALHCTPLPNGNFEVGVRXHIADVTNFVHPGTPLDEEASQRGTSVYLVGQRIDMLPKPLTXRDVCSLRADVERLAFSVIWEMTPHADIISTRYTKSVIKSCAAMSYVEAQARMDDSSRLVDPLTVDLRNLNSLAKXIMRHRRCERGALTLASAEVKFEIDSETHDPLDIEXIYQIREANQMIEEFMLAANISVAEKILKHFPLCSLLSXPRRHPSPTKEMLEPLLRTASSVGLNLDVSSSKALAESLDNAXENDDPYFNKLIRILATRCMTQTQAVYFCSGDLTFSEYYHYGLAASLYTHFTSPIRRYAADVIVHRLLAAALEIAKLPPLFQDGPQLTGVADNLNYRHRNAQMASRASVELHTLIYFRTRGLGIEGPIYLTPKGDKGGDWVVDEVHQRVTKPGTNVSYAVLQTVMIHMERAGRTMKRIIVHHDRYDYQRFHSRPFFA

SEQ ID NO: 171 - DNA, 732 bp, Oryza sativa; identical to SEQ ID NO: 33

SEQ ID NO: 172 - protein, 243 aa, Oryza sativa; identical to SEQ ID NO: 34

SEQ ID NO: 173 - DNA, 843 bp, Oryza sativa
atggcaccttccaaggtcagcctcgccgccgtgctcgccgtggccatctcgctggccatggcggccaccaccaccacctcggcgcagaacacgccgcaggactacgtcaacctgcacaacagcgcgcggcgcgcggacggcgtcggcccggtgagctgggaccccaaggtcgccagcttcgcgcagagctacgcggccaagcgcgccggcgactgccggctgcagcactccggcgggccgtacggcgagaacatcttctggggctcggcggggcgcgcctggagcgccgccgacgcggtggcgtcgtgggtgggcgagaagaagaactaccactacgacaccaacacgtgcgacccgggcaaggtgtgcggccactacacccaggtggtgtggcgcaagtcggtgcgcatcggctgcgcccgcgtcgtgtgcgcggcgaaccgcggcgtgttcatcacctgcaactacgaccccccgggcaacttcaacggcgagcgcccgttcctcaccctcgacgccgcggccaaaacctcgccggatccttgtgcagggggtgcagtactgcgcctaccacggttggactgcagtggtgacactgcccggcgagccatgagatcttcccttggagatggagtcgctgccgccaccatcaaccgctcctccaccacctccaccgacaccaagccgacgccgacgccgttcctccactcccgcgccactggggtctggccggaccggtaccctggctgcgcgcacgggagccgcccttcttcaatccgtcctcgtctcgtcgtcacgccggtgaagccgccgctcgccgtcccggcctccgccacacattga

SEQ ID NO: 174 - protein, 280 aa, Oryza sativa
MAPSKVSLAAVLAVAISLAMAATTTTSAQNTPQDYVNLHNSARRADGVGPVSWDPKVASFAQSYAAKRAGDCRLQHSGGPYGENIFWGSAGRAWSAADAVASWVGEKKNYHYDTNTCDPGKVCGHYTQVVWRKSVRIGCARVVCAANRGVFITCNYDPPGNFNGERPFLTLDAAAKTSPDPCAGGAVLRLPRLDCSGDTARRAMRSSLGDGVAAATINRSSTTSTDTKPTPTPFLHSRATGVWPDRYPGCAHGSRPSSIRPRLVVTPVKPPLAVPASATH

SEQ ID NO: 175 - DNA, 726 bp, Oryza sativa
  misc_feature (195)..(195): s = guanine or cytosine
  misc_feature (217)..(217): s = guanine or cytosine
  misc_feature (273)..(273): r = adenine or guanine
  misc_feature (288)..(288): r = adenine or guanine
  misc_feature (295)..(295): r = adenine or guanine
  misc_feature (417)..(417): s = guanine or cytosine
atgggtacaaaccctagcctgcacgagctggcggcgggggcggcgccgcggggacgcgtggtgcgtatcctcgtgcgcgacgccgacgccaccgactcgtcctccagcgaggacgaggcggttgcggtggcgcagcctcggccgcggcgaaggggtaaggtgggtggtggtggtggtggtggtgggggcttgaascgccgcttaatggaggcggggscggggaaggccaggccaaccgcgcgtttccgcggcttgcggcagcggccgtggggraggttcgcggcggaratccgcraccctaacttcggcggccgcctgtggctcggaactttcgacaccgccgaggaggccgccgccgcatacgacgccgccagcgtccgcctccgcggttccagcgccgccaccaacttcgcctcsgtccgctgctactcgctgccgccggagctacccaagccaactatttcaccgcctgaagcagctgtgaggccaatcaccttgccaattgggacagctaagccgacccttcttccacgggtgaaggaggaaggtgagagctgtggcggtcgggtcaaggaggaggccagtagctgtgaggtccaggtgcttgctccggagccaatgtggacgatgatttcaggcaagcgtaagaagcgatcgggctgtggaacccgtgtccgtgccttccatgctgtgtccgcctgtgtggaagaagttggcggggcctga

SEQ ID NO: 176 - protein, 241 aa, Oryza sativa
MGTNPSLHELAAGAAPRGRVVRILVRDADATDSSSSEDEAVAVAQPRPRRRGKVGGGGGGGGGLNRRLMEAGPGKARPTARFRGLRQRPWGRFAADIRHPNFGGRLWLGTFDTAEEAAAAYDAASVRLRGSSAATNFASVRCYSLPPELPKPTISPPEAAVRPITLPIGTAKPTLLPRVKEEGESCGGRVKEEASSCEVQVLAPEPMWTMISGKRKKRSGCGTRVRAFHAVSACVEEVGGA

SEQ ID NO: 177 - DNA, 498 bp, Oryza sativa; identical to SEQ ID NO: 23

SEQ ID NO: 178 - protein, 165 aa, Oryza sativa; identical to SEQ ID NO: 24

SEQ ID NO: 179 - DNA, 3111 bp, Oryza sativa
atggcggggacgcatggttttcgtagggtaggcgtggtcgagatggaagcggcgacggcggctgaggtggccggtgccggcagcggcacggatggcgatttgcagattaaaggcagcaaggagaatggtcagactgcggagcagccggcggccagcgaggcgcttgagatgccctccactccgctcccgctcccgagggacatagattggtcggagcatttctccttcttcaattcggtgggcgggtttgggggcagcatggatggcgcgaggggcttgactagtgttggcctatctaattctgagtcgaggccggatagtgtaacccagatccagagctgtttgaacaatgcagacgagagggttgaggagctcacattgaaaaattgcatcagctccgatgcgcaacatgaggtttcagctggtggaagcacgagcagcggggagaagcctacagttatgaggggtctgtggggtaattttacaaggatgtcatggagagctagcgacgtggctaacagggaaaaattagcagcgaatcgtggtgacgttgcaaacttgagggtcggtgacatgcccatcagggaaaatttggcggtgagcttcggcaacaatatgatctcacgaaatgatgcatccaacaaggaaatgggaatgagccatggggatcatgcgaataacgagttcaatttgccgtttggtaatcagcagccttttctgtctccacggcctaatcagaatgagcagcgagttgaaagggagaatgctctcatagtgagtagcttttcagctagaattctggatcagatgaggagtaagaatgtaacaccttcgtctggggttcagagcttcccatttaagagtgtgttgaagggtaaaggtgttgtatatcaaggtgcacgagaggagatccaagttcaaggtaatgcaaggaccagagcccctatggataagattcgcaagatccctaacataccacaggattccatggctagaatggatggtacaatctttggcagtggtggaaatgttttagaaccacagtgcgagggaaccagcctaagggaactaattaagcctgcacgccaaacaatgagcaagtttgagaaaatgcacttctttaagcagattcttgatctcgtagacaaatctcatgcccagggttttagtttacagcatttgcgcccatcatactttactatctcagcctcaaaccaagtaaaatatattggttcttatggtacccaagatttatcagccccaagcaaactggatattgcgacggatgatattttcaatacaaaaagataccttgatcccaaagttgagtcccaagattctaatggcgataatgcttcaatcacaaagtatcaaaaagttggtgaacaaggatccattgctgtaaggcgaccagtgcataccttttgggctaatcacagagggggcaaccaaagtgaaggtgttgatcctggtgctttgtggcagggcaattcgagctgcactgtccgagaacgttttaaggctgcagaacctttctatggtggcagtatgccctatgctcaacgaccatcaagttctggcaaccaacagtcagtatttgaattgaggatgctggaggaaagctggtacagaagtccagaagagatcagtcagttgaaaggcatacttccatcaaacatctacagccttggggttcttttgtttgagatctccgtcatcgcattttgcccccaaattttctttcagaaagtcctaaagaagctggtttctgtctttggttactccatccagatccctgttctcggcctaaggcaagataataaaacaccagttgctgtcaatgaagaagacaccgaatctggtttgctactgggcttcctttctcaactcaaggaagaaaaggagatgcacgctgccaaattgtcagctgatcttgcgagcttggaaacagatatcgcagaggttgagaaaagacactcaatgaggatgggatttagtttagaggacatggatgtactggcaggttctaatgatctctcaggagcttctgcatgtgccctgggaggtgcatcactctcaggtcccaccattgacacatcggaggccaatataattaaacgagttgataatgatgctttaagggttcgtcaaaattttcacgagctgcatagtgatgctaatgctatcgatgagcaagcagacccccttggatggtttttcgatggcttatgcaagtatgcccggtatagtaggtttgaagtacggggaattctgaagaatgcagatatacttaactcaccaaatgtgatttgttcgttaagttttgatcgggatgaagaatattttgctgctgctggtgtttcaaagaaaattaaaatatttgaatttgatgcccttttaaatgatcgtgttgatattcattacccattgatagagatgcctagcaaatccaagcttagctgtgtctgttggaacagctacataaaaaattacttggcatcaacagactacgatggcactgttcagttgtgggatgcaagctcgggtcaaggattcacgcagtttacggagcaccgaaaaagagcttggtctttctccccatactcctctcgtatgttagcttttggctcggctgattataagatatactgttatgatctgaggaatacaagaatcccatggtgtactatttctgggcatggaaaagctgtcagctatgtacgattcttggatccagaaacacttatctctgcatcaactgataacaccttgaaaatatgggatctcaaccagactaattccagtggattatctactgatgcctgcagtatgacgttgagtggccataccaatgagaagaattttgtggggttatctgttcacgatggatacataacttgtggttctgaaaataatgaagtattttcttattacaaaacctttcccatgccaataacttctcacaagttcggttcaatcgacccaataactggacaagagacaaatgatgataaccaacaatttgtgtccagtgtttgctggcgagggaggtcgaacatggtagtggctgccaattctactggcagcattaaagtgcttgagcttgtgtga

SEQ ID NO: 180 - protein, 1036 aa, Oryza sativa
MAGTHGFRRVGVVEMEAATAAEVAGAGSGTDGDLQIKGSKENGQTAEQPAASEALEMPSTPLPLPRDIDWSEHFSFFNSVGGFGGSMDGARGLTSVGLSNSESRPDSVTQIQSCLNNADERVEELTLKNCISSDAQHEVSAGGSTSSGEKPTVMRGLWGNFTRMSWRASDVANREKLAANRGDVANLRVGDMPIRENLAVSFGNNMISRNDASNKEMGMSHGDHANNEFNLPFGNQQPFLSPRPNQNEQRVERENALIVSSFSARILDQMRSKNVTPSSGVQSFPFKSVLKGKGVVYQGAREEIQVQGNARTRAPMDKIRKIPNIPQDSMARMDGTIFGSGGNVLEPQCEGTSLRELIKPARQTMSKFEKMHFFKQILDLVDKSHAQGFSLQHLRPSYFTISASNQVKYIGSYGTQDLSAPSKLDIATDDIFNTKRYLDPKVESQDSNGDNASITKYQKVGEQGSIAVRRPVHTFWANHRGGNQSEGVDPGALWQGNSSCTVRERFKAAEPFYGGSMPYAQRPSSSGNQQSVFELRMLEESWYRSPEEISQLKGILPSNIYSLGVLLFEISVIAFCPQIFFQKVLKKLVSVFGYSIQIPVLGLRQDNKTPVAVNEEDTESGLLLGFLSQLKEEKEMHAAKLSADLASLETDIAEVEKRHSMRMGFSLEDMDVLAGSNDLSGASACALGGASLSGPTIDTSEANIIKRVDNDALRVRQNFHELHSDANAIDEQADPLGWFFDGLCKYARYSRFEVRGILKNADILNSPNVICSLSFDRDEEYFAAAGVSKKIKIFEFDALLNDRVDIHYPLIEMPSKSKLSCVCWNSYIKNYLASTDYDGTVQLWDASSGQGFTQFTEHRKRAWSFSPYSSRMLAFGSADYKIYCYDLRNTRIPWCTISGHGKAVSYVRFLDPETLISASTDNTLKIWDLNQTNSSGLSTDACSMTLSGHTNEKNFVGLSVHDGYITCGSENNEVFSYYKTFPMPITSHKFGSIDPITGQETNDDNQQFVSSVCWRGRSNMVVAANSTGSIKVLELV

SEQ ID NO: 181 - DNA, 1584 bp, Oryza sativa
atggcgacgctgctctccaagctcctagctctgcctcaacaatggcagctcctcctactcctcctcctcctcccaatcgcctccctcctgttggtaattggcaggaacaccggcggccgtcgtcgccggcggcatcttagactgcctccgggcccagcgcggctgccggtcctgggcaacctgctccagctgggcgcgctgccgcaccggagcctgcgggatctggcgcggcggcacgggccggtgatgatgctgcggctgggcgcggtgccggcggtggtggtgtcctcgccggaggcggcgcaggaggtgctgaggacgcacgacgccgactgctgcagccggccgtcctcgccggggccgatgcggctgtcgtacgggtacaaggacgtggcgttcgcgccgtacgacgcctacggccgcgcggcgcgccggctgttcgtcgccgagctcttcagcgcgccgcgcgtccaggccgcatggcgcgcgcgccaggaccaggtggagaagctgatcgggaagctgacacggccggagccggagccggtggagctgaacgatcacatcttcgccctgaccgacggcatcatcggcgcggtggcgttcggcagcatctacggcacggagcggttcgccggcggcggcaggaagcgcttccaccacctgctcgacgacgtcatggacatgctcgccagcttctccgccgaggacttcttccccaacgccgccgccgcccgcctcttcgaccacctcaccggcctcgtcgcccaccgcgagcgcgtcttccaacagctcgacgccttcttcgagatggtcatcgagcagcatcttgactctgacagcagcaacgccggcggcggcggcggcaacctcgtcggcgccctgatcggcctgtggaagcaggggaagcagtacggcgatcgccggttcaccagggagaacgtcaaggccatcatcttcgacgcgttcatcggtgggatcgggacgagctcggtgacgatcctgtgggcgatggcggagctgatgcggtcgccgcgggtgatgcggaaggtgcaagccgagatcagggccaccgtcggcgaccgagatggcggcggcatggtgcagccggacgacctgccgaggctcgcctacctcaagatggtggtgaaggagacgctgcggctgcacccgccggcgacgctgctgatgccgcgggagacgatgcgcgacgtgaggatcggcgggtacgaggtggcggcgaggacgcgggtgatggtgaacgcgtgggcgatcgggagggacgcggcgaggtgggaggaggcggaggtgttcgacccggacaggttcgaggcgaagcgggtggagttcaacggcgggcacttcgagctcctgccgttcgggtcggggcggcggatctgccccggcatcgccatgggcgccgccaacgtggagttcacgctggccaacctgctgcactgcttcgactgggcgctgccggtggggatggcgccggaggagctgagcatggaggagtccggcggcctcgtgctccacaggaaggcgcccctcgtgctcgtgcccactagatacatacaactatag

SEQ ID NO: 182 - protein, 527 aa, Oryza sativa
MATLLSKLLALPQQWQLLLLLLLLPIASLLLVIGRNTGGRRRRRHLRLPPGPARLPVLGNLLQLGALPHRSLRDLARRHGPVMMLRLGAVPAVVVSSPEAAQEVLRTHDADCCSRPSSPGPMRLSYGYKDVAFAPYDAYGRAARRLFVAELFSAPRVQAAWRARQDQVEKLIGKLTRPEPEPVELNDHIFALTDGIIGAVAFGSIYGTERFAGGGRKRFHHLLDDVMDMLASFSAEDFFPNAAAARLFDHLTGLVAHRERVFQQLDAFFEMVIEQHLDSDSSNAGGGGGNLVGALIGLWKQGKQYGDRRFTRENVKAIIFDAFIGGIGTSSVTILWAMAELMRSPRVMRKVQAEIRATVGDRDGGGMVQPDDLPRLAYLKMVVKETLRLHPPATLLMPRETMRDVRIGGYEVAARTRVMVNAWAIGRDAARWEEAEVFDPDRFEAKRVEFNGGHFELLPFGSGRRICPGIAMGAANVEFTLANLLHCFDWALPVGMAPEELSMEESGGLVLHRKAPLVLVPTRYIQL

SEQ ID NO: 183 - DNA, 2091 bp, Oryza sativa
atggactccaagctctccatgctcttcttgttgctaggctttgtggcatgttctgccactgctagtcaccatgatccttccgttgtcggatactcgcaggaggatcttgcattgccaaataagcttgttggtctcttcacatcatggtcagtaaaacatagcaagatctatgcaagcccaaaggagaaggtcaagaggtatgagatcttcaagcgaaacctgaggcacattgtggagacgaacaggagaaatggcagctattggctcggcttaaatcattttgctgacattgcacatgaagaattcaaggccagttacctgggactgaagccagggttagcaagaagggatgctcagccacatggttcaacaacattcaggtacgcgaacgccgttaacttgccctgggcagtggactggaggaagaagggagcagtgacaccggtcaagaaccaaggagaatgtggaagttgctgggctttttcaacggtggcagctgttgaggggataaaccagattgtgaccggcaagttggtatcactatcagagcaggaactgatggactgcgacaacaccttcaatcatggctgtcgaggtgggctgatggacttcgccttcgcatacataatggggaaccaggggatctacacagaggaagactacccatacctcatggaagaaggctactgcagagaaaagcagcctcattccaaagtcatcaccataaccggctacgaggatgtcccggcgaacagcgagacaagcctactgaaggcactggctcatcagcctgtcagtgtggggatagcagctgggagcagagactttcagttctacaaaggggggatctttgatggggaatgtggcattcaaccggatcatgcactgacggccgtgggctacggctcgtactacggccaggactacatcatcatgaagaactcgtggggcaagaactggggagagcaagggtatttcaggatcaggaggggcaccggcaagccggagggagtctgtgacatatacaagattgcttcttacccaaccaaaaacgtagtaaagcgcggtcgccgtcgccggcgacccatacagccatactgttccactcgccctcgttttctccgccaccgagcgcatctcggcgtcggcggcttggggggagagtcagagatgcatctgagcgagaacgaggggatcgagggcgtgcggttcgcggtgacgggcggccagggcttcgtcggctccgcactgtgcctcgagctgctccgccgcggcgcccgggaggtccgctccctcgacctccgcgcctcctccccctggtccgaccagctgctcggcgccggcgtccgcttcttccaagggaaggaaatggtacaggctgggcgagccgacgaggtcaatataaatggtacatgcaatgtgctggacgcttgccacgagcatggtgttagaaggctcgtgtatgtaagcacgtataatgtggtttttggaggagagccgattgtcaatgggaacgaggcgctgccttatttccctgttgaagaccatgttgatgcctatgcgcgtagcaaatcaattgctgaacagttggtgctgaagagtaatggccggcaaactaagagtgataaaagcagtcgtctttatacatgctcaatacgtcccgccgctatctatggtccaggtgaagagcggcatcttccaaggatactatcccttgcgaagttgggattagcattcttcaagattggggatccaaatgtgaagtcagattgggtctatgtggataatcttgttcttgcactgatattggcaagcatgggacttttagatgatattcctgacaggaagggaattcctgtagctgctggtcaagcatatttcatatgtgatgctagagaggaaatcggctatgtacctatgttggtgattcggttagtctttgtgatagcaactgcattgcacgttggtgaagctgtttatgcttggttcttggcaaagaagtatgacccgaggaatgctacagctatctacctacctctgaactggaagtcccaagaactacaagcatattacagcctgatggcagagtga

SEQ ID NO: 184 - protein, 696 aa, Oryza sativa
MDSKLSMLFLLLGFVACSATASHHDPSVVGYSQEDLALPNKLVGLFTSWSVKHSKIYASPKEKVKRYEIFKRNLRHIVETNRRNGSYWLGLNHFADIAHEEFKASYLGLKPGLARRDAQPHGSTTFRYANAVNLPWAVDWRKKGAVTPVKNQGECGSCWAFSTVAAVEGINQIVTGKLVSLSEQELMDCDNTFNHGCRGGLMDFAFAYIMGNQGIYTEEDYPYLMEEGYCREKQPHSKVITITGYEDVPANSETSLLKALAHQPVSVGIAAGSRDFQFYKGGIFDGECGIQPDHALTAVGYGSYYGQDYIIMKNSWGKNWGEQGYFRIRRGTGKPEGVCDIYKIASYPTKNVVKRGRRRRRPIQPYCSTRPRFLRHRAHLGVGGLGGESEMHLSENEGIEGVRFAVTGGQGFVGSALCLELLRRGAREVRSLDLRASSPWSDQLLGAGVRFFQGKEMVQAGRADEVNINGTCNVLDACHEHGVRRLVYVSTYNVVFGGEPIVNGNEALPYFPVEDHVDAYARSKSIAEQLVLKSNGRQTKSDKSSRLYTCSIRPAAIYGPGEERHLPRILSLAKLGLAFFKIGDPNVKSDWVYVDNLVLALILASMGLLDDIPDRKGIPVAAGQAYFICDAREEIGYVPMLVIRLVFVIATALHVGEAVYAWFLAKKYDPRNATAIYLPLNWKSQELQAYYSLMAE

SEQ ID NO: 185 - DNA, 940 bp, Oryza sativa
atggcgggcggcgccaccgtgtgcgcggcgcagctccggcggaactactacgccggcgtgtgccccaacgtggagtccatcgtccgcggcgctgtggcgaggaaggtccaggagacgttcgccaccgtcggcgccaccgtgcggctcttcttccacgactgcttcgtcgacggctgcgacgcgtcggtggtggtcgcgtcggcggggaacaacacggcggagaaggaccaccccaacaacctctccctcgccggcgacggcttcgacaccgtcatcaaggccaaggccgccgtcgacgccgtgccgggatgccgcgaccgcgtctcctgcgccgacatcctcgccatggccaccagagacgccatcgcgctggtgcaggccggaggaccgtcgtacgcggtggagcttgggcggctggacgggctgagatcgacggcgagcagcgtcaacgggaggctgccgccgccgacgttcaacctcgaccagctcacggcgctcttcgccgccaacggcctctctcaggccgacatgatcgccctctccggcggggcacacggtggggttcgcacactgcaacacattcttgggtcggatccgtgggtcgtcggtggatccaacgatgagcccaagatacgcagcccagctacagaggtcgtgcccacccaacgtggacccgcggatcgccgtgaccatggacccggtgacgccgcgggccttcgacaaccagtacttcaagaacctgcagaacgggatgggccttctgggctctgaccaggtgctgtactcggacccacggtccaggcccatcgtggattcttgggcccagagcagcgccgccttcaaccaggccttcgtcacggctatgaccaagttgggccgggttggggtcaagaccgggtcgcaaggcaacattcgtcgcaattgtgcagtgctcaattaa

SEQ ID NO: 186 - protein, 312 aa, Oryza sativa
MAGGATVCAAQLRRNYYAGVCPNVESIVRGAVARKVQETFATVGATVRLFFHDCFVDGCDASVVVASAGNNTAEKDHPNNLSLAGDGFDTVIKAKAAVDAVPGCRDRVSCADILAMATRDAIALVQAGGPSYAVELGRLDGLRSTASSVNGRLPPPTFNLDQLTALFAANGLSQADMIALSGGHTVGFAHCNTFLGRIRGSSVDPTMSPRYAAQLQRSCPPNVDPRIAVTMDPVTPRAFDNQYFKNLQNGMGLLGSDQVLYSDPRSRPIVDSWAQSSAAFNQAFVTAMTKLGRVGVKTGSQGNIRRNCAVLN

SEQ ID NO: 187 - DNA, 663 bp, Oryza sativa
  misc_feature (123)..(123): s = guanine or cytosine
  misc_feature (191)..(191): s = guanine or cytosine
atgacggccgccctgcaagcgctgctcgacccgacggcgctgtccttgggcctgcccacgccggcgatcaacaaggaggagtacctcgccatctgcctcgccgcgctcgcctgcacgcgggcsgggaaggccctggtgggaattggaggccagcagcaggtgcaggcctgcaataagtggctgtgcccagsgcccgcggcgcctgaggagctccgcttccggtgcaccgtctgcgggaaggccttcgcctcgtaccaggcgctcggcggacacaagtccagccaccggaagccgccttccccgggagaccactacggcgccgccgccgcggcgcagcagctggcatccgctggtgactcgaaggaggactcggcgtcgtcagcggccgggagcactggcccgcaccggtgcaccatctgcaggaggagcttcgcgacggggcaggcgctcggcggccacaagcgctgccactactgggacggcacgtcggtgtccgtctccgtctcggcgtccgcgtcggccgcctcgtcggccgtcaggaacttcgacctcaacctgatgccgctgccggagagcacagccgccgccgggatcaagaggtgggcggaggaggaggaggtgcagagtccactgccggtcaagaagctcaggatgtccaactaa

SEQ ID NO: 188 - protein, 220 aa, Oryza sativa
MTAALQALLDPTALSLGLPTPAINKEEYLAICLAALACTRAGKALVGIGGQQQVQACNKWLCPAPAAPEELRFRCTVCGKAFASYQALGGHKSSHRKPPSPGDHYGAAAAAQQLASAGDSKEDSASSAAGSTGPHRCTICRRSFATGQALGGHKRCHYWDGTSVSVSVSASASAASSAVRNFDLNLMPLPESTAAAGIKRWAEEEEVQSPLPVKKLRMSN

SEQ ID NO: 189 - DNA, 2568 bp, Oryza sativa
atgccgctgaacccgagcctgcggagcatccgcctcgactgcgctaggctcgaggacgccgccatcgactgccttgcccgccccgacctccatgagctgatgctcctcaactgcgataacattagcggccgcctgctctgcgagcttggagccacctgccaagaactcagtcgcttctgttctgaactaaagtttgattcagttgtcaaatatggtattgagaagtacatttctttcccgcttggatgtagagtgctttccctgaatgcccttgctgagcgtaggggactaccgataagcttctctgatctgcagcaattgcttaatggctgttctcaattggagtctctcaggttggcccttgatttctcaatgttcgatgaccccaattttagccatgtgtgggcatctgcttcagaagccctgacctccctagaaatcggatatattccaatgacaatgttgcttgaacttcttactgtggctatggaatcgcaacgatgcatgcatcatgtaaaggaacctgttttctttcctagcctccaaaagttatgcctcaccgtggacttcatcactgaccatttgattggttcactatcaactgcgcttccatcattgacacatctggacctgcaggatgcacctataatagaacctacaacatcatcagatctcaccaatgctggtcttcagcagattaatccaaatggtaagttgaagcatatttctctcatgagaagtcaggagttcttattcacctctttccgccgagtaaatgatcttggaatcctgctaatggctgaaaagtgctcaagtcttgagagtgtctgtcttggtggtttctcccgcgtgacagacacaggttttagggctatcatccactcttgttctggccttcataagcttagggtgtcccatggaagccagttcacagatcttgttttccatgacataattgccacttccctttgcctgacacatgtgagcctgaggtggtgtaatctccttactgacgttggaattgagaggttgtcattcaacaaggatctcaacgtattggatctcagggactgcaggagtctgggtgatgaagctgttagatctctaagctgccttcccaaattgcagatattattcttggatggaagtgatatcagtgatcaggcattgaagtatctgggccttggaacatgtccactagcttccttatctctgaggggttgccgaaagttaacaaatgattgcataccactcttgtttgctggttctgttaaacagagcttacaggtgttggatctctctagaataccaggtattactgatgatggtatcatgttattagcaaggagtcgaactcctattattgaactccgaatgagagagaacccgaaaataggagatgctgctgtgatggctcttgcgtctatgctagttgatggtggaacccatggcagtagcttgcagctgctggatctttatgattgtggtgcgattacaccacttgcaatccggtggttcaagaaaccatatttcccaagattgcgatggctaggagtaacgggcagcttgaacagggttatggtggatgcccttgttcgaagccgtccattcttacatatggcttgccgtggtgaagaattggggactttcaattgggatagatcctccgattggtatcgacatgatgatgatgatcttgatgagcttgaacagtggattttgaatggccactcgagcccatctgtcagtgtgtcagactgtcagtgtgccgctcactcgcgtccctccgtctccggccagctagtggagtggagtacattcactagtggtttgcttccagttcctatccaatctctggtcttccggcaggtccccgaagaaggagcggcggcgatggcggcgcctgtgacggtgtacggtccgatgatctcgccggcggtggcgcgcgtggcggcctgcctcctggagaaggacgtgccgttccaggtcgagccggtcgacatgtccaagggcgagcacaagtccccttccttcctcaagctccagcccttcggccaggtccccgcattcaaagacagcctcaccaccgtcttcgagtcgagggctatttgccgttacatctgtgaccagtacgccgacagcggtaacaagaccctcatgggcaggaaagaagatggggcggttggccgcgctgccattgagaaatggatagaagctgaaggccagagcttcaacccaccgagcttggcaatggcattccagctcgcatttgcgccgttcatgggtagggccactgacatggccgtggttgaacaaaatgaagcgaaacttgtgaaggtgctcgatgtttacgagcagtggctgggggagaaccagtattttgcaggtgatgagttctcgctggcggacctggtgcacatgcccaacacagatcttcttgtgcgcaagaccaacaaggcagggttgttcacggagagaaagaatctggcgaggtggtgggatgaggtatcagctcgtccttcatggaagaaggttgttgagttgcagaatgtaccacggccctcatga

SEQ ID NO: 190 - protein, 855 aa, Oryza sativa
MPLNPSLRSIRLDCARLEDAAIDCLARPDLHELMLLNCDNISGRLLCELGATCQELSRFCSELKFDSVVKYGIEKYISFPLGCRVLSLNALAERRGLPISFSDLQQLLNGCSQLESLRLALDFSMFDDPNFSHVWASASEALTSLEIGYIPMTMLLELLTVAMESQRCMHHVKEPVFFPSLQKLCLTVDFITDHLIGSLSTALPSLTHLDLQDAPIIEPTTSSDLTNAGLQQINPNGKLKHISLMRSQEFLFTSFRRVNDLGILLMAEKCSSLESVCLGGFSRVTDTGFRAIIHSCSGLHKLRVSHGSQFTDLVFHDIIATSLCLTHVSLRWCNLLTDVGIERLSFNKDLNVLDLRDCRSLGDEAVRSLSCLPKLQILFLDGSDISDQALKYLGLGTCPLASLSLRGCRKLTNDCIPLLFAGSVKQSLQVLDLSRIPGITDDGIMLLARSRTPIIELRMRENPKIGDAAVMALASMLVDGGTHGSSLQLLDLYDCGAITPLAIRWFKKPYFPRLRWLGVTGSLNRVMVDALVRSRPFLHMACRGEELGTFNWDRSSDWYRHDDDDLDELEQWILNGHSSPSVSVSDCQCAAHSRPSVSGQLVEWSTFTSGLLPVPIQSLVFRQVPEEGAAAMAAPVTVYGPMISPAVARVAACLLEKDVPFQVEPVDMSKGEHKSPSFLKLQPFGQVPAFKDSLTTVFESRAICRYICDQYADSGNKTLMGRKEDGAVGRAAIEKWIEAEGQSFNPPSLAMAFQLAFAPFMGRATDMAVVEQNEAKLVKVLDVYEQWLGENQYFAGDEFSLADLVHMPNTDLLVRKTNKAGLFTERKNLARWWDEVSARPSWKKVVELQNVPRPS

SEQ ID NO: 191 - DNA, 2037 bp, Oryza sativa
  misc_feature (61)..(61): s = guanine or cytosine
atgggggcaccctccccattttcccacgggcagatctggcggcgacggtggcttcccggcsgccggggaaggagcggaggccactggcgagggtggcgtagactagccgacgttagggggaggaggccagtggggcgcggtcccgcgccaccgcccgccacgtgctccgtgaggtgggccgcgacgacgtcgtcgtcgtcgacggcgcgccgtctctgcccagttcgccatggctggcgtagacccgggcactgcgacggtggcaggaaggcgagtgtatgtgaggaggccggtggggcgaggcgggaccggcgtcaacggggcgaagcggcgggtgtgccggagacccacttctgccagacctacgccggcggctccatcgacggtgccatcaagctcaaccacggccacgacatcgccatcaacaccctcgagctcgcctgcgcggcgacaccctccccttctccaacggcgctgcccccgccgacgccgacgtcctcctctttctcccacctcctgggcctctctgaccctaagacggtggggcaggggagagggcgagaaccgcggcgacggcctcccgcgcccaccctcacccgccgccacccagctcctctcctggtaaccatgccgcccgcgccaagctccatgtcgccggctgcgcactactctgcccccgatggccgcaccctgctcctcccccgacggtcgcgctcagctcctcccccggcgacggtggcggcgtgggaggacggcagtgagaggccgtgcggcaccggcaatcggtgtccaacggtctcgccgagggcttctgcctcatcgccctcctcgagttcctctactaggaggcccccgacgccatgcgcagcctcacctccgcctacgccgccctcgccgatggcctcggctgcttcttcgccggtggcctacgccgcccttgctggtggcctccgctccttccccctccgtcctgagaagatagatctccctctgttgcttcctcggatctgcttcgctctcgtgctctacgcctcacacgacgcgctcttcctcgtcgccaccaactttgttgctgcgcgcgcgtacgtcgtctttgcttctgccccaaaggagaaaggtctttctgggtttatgattgacttcatgatgggtggagtttcagctgctgtctccaagactgctgctgctcccattgagcgaatcaagcttctcattcaaaaccaggatgaaatgatcaagagtggtaggctctctcacccatacaaaggtattgcggactgctttggccgcacaattaaggatgaaggtgtgattgcactgtggagagggaacactgctaatgtcatccgttactttcctacccaggccttgaactttgccttcaaagaccatttcaagcgcatgttcaactttaagaaggacaaggatggttactggaagtggtttgctggaaacctggcttctggaggagctgctggtgcttgctctctcttctttgtgtattctctggattatgctcgtactcgtctggctaatgatgccaaggctgcaaagaagggtggtgggaggcaattcaatggacttgttgatgtttaccgcaagacccttgcgtctgatggtattgctggtctgtacccgtggattcaacatctccctgtgttggtatcattgtctaatcgtgggctgtactttggaatgtatgattctctcaagccagtcgttcttgttggcaaccttcaggataacttccttgccagcttcttacttggttggggcattaccattggtgctggccttgcttcatacccaatcgacactgttcgtcgtcggatgatgatgacatctggtgaggctgtcaagtacaacagctccttggatgcgttcaagcagattgttgcgaaggagggtgcgaagtcactcttcaagggcgctggtgctaacattctgcgtgctgttgctggtgctggtgtgcttgctggatatgacaagctgcaggtggtcgtctttggtaagaagtacggttctggtggtggctaa

SEQ ID NO: 192 - protein, 677 aa, Oryza sativa
MGAPSPFSHGQIWRRRWLPGRGRSGGHWRGWRRLADVRGRRPVGRGPAPPPATCSVRWAATTSSSSTARRLCPVRHGWRRPGHCDGGRKASVCEEAGGARRDRRQRGEAAGVPETHFCQTYAGGSIDGAIKLNHGHDIAINTLELACAATPSPSPTALPPPTPTSSSFSHLLGLSDPKTVGQGRGREPRRRPPAPTLTRRHPAPLLVTMPPAPSSMSPAAHYSAPDGRTLLLPRRSRSAPPPATVAAWEDGSERPCGTGNRCPTVSPRASASSPSSSSSTRRPPTPCAASPPPTPPSPMASAASSPVAYAALAGGLRSFPLRPEKIDLPLLLPRICFALVLYASHDALFLVATNFVAARAYVVFASAPKEKGLSGFMIDFMMGGVSAAVSKTAAAPIERIKLLIQNQDEMIKSGRLSHPYKGIADCFGRTIKDEGVIALWRGNTANVIRYFPTQALNFAFKDHFKRMFNFKKDKDGYWKWFAGNLASGGAAGACSLFFVYSLDYARTRLANDAKAAKKGGGRQFNGLVDVYRKTLASDGIAGLYPWIQHLPVLVSLSNRGLYFGMYDSLKPVVLVGNLQDNFLASFLLGWGITIGAGLASYPIDTVRRRMMMTSGEAVKYNSSLDAFKQIVAKEGAKSLFKGAGANILRAVAGAGVLAGYDKLQVVVFGKKYGSGGG

SEQ ID NO: 193 - DNA, 858 bp, Oryza sativa
atggccgaggcggtcgcaagcggcgcagcggggagatggaccctccgcggcaagacggccctcgtcaccggcggcacccgcggcatcgggtactcaccccaacacccttctctggttctcccctatcgctacccagtgaggagtgagacctccaccgcagagcctttgctgctcttccacgatcaacgcggggaattcatgcgcaggcatgcggtggtggacgagctggcggcgctgggggcggccgtgcacacctgctccaggaaggaggccgagctgggcgagcgcctcagggagtgggagggcaagggcttccgcgtcaccggctcagtctgcgacgtctccgtgaacaacgtgggaacaaacttttcaaaacaaaccactgaatactctgcagatgattactcgttcataatggccaccaatcttgaatctgcgtatcatctgtgccaacttgctcatcctcttctcaaatcatctgggtcaggaagcgttgtcttcatatcgtcagtctctggagtggtggctgtaagttctggctctgtctatgcgatgacaaaaggtgccatgaaccagctggccaagaacctggcatgtgagtgggcgaaagacaatataagaaccaattctgttgcaccatggtacatgaagacttcacttgtggaagatgaattggcaaggaaggacttcgctgacagcgtcgtgcgtcgaacagcgctgaagcgcgtgggagaaccagaagaggtgtcatcgctggtcgcgttcctgtgcatgcccggcgcttcctacatcaccggccagacgatctcggtcgacggcggcatgaccataaacggactgtatccaactcaggactag

SEQ ID NO: 194 - protein, 285 aa, Oryza sativa
MAEAVASGAAGRWTLRGKTALVTGGTRGIGYSPQHPSLVLPYRYPVRSETSTAEPLLLFHDQRGEFMRRHAVVDELAALGAAVHTCSRKEAELGERLREWEGKGFRVTGSVCDVSVNNVGTNFSKQTTEYSADDYSFIMATNLESAYHLCQLAHPLLKSSGSGSVVFISSVSGVVAVSSGSVYAMTKGAMNQLAKNLACEWAKDNIRTNSVAPWYMKTSLVEDELARKDFADSVVRRTALKRVGEPEEVSSLVAFLCMPGASYITGQTISVDGGMTINGLYPTQD

SEQ ID NO: 195 - DNA, 1872 bp, Oryza sativa
atggaggactggatgccaccacccacacccagcccgagaacactcatgtcaagcttcttgaatgaagattttgtctctggttcattttccaatattttcagtgatcatgagagcaacaaaccccaggatcagtttgagagaaacagagagcttgtggatttgagtaaggaagtgccttcccaattcgcaagacccgcattccagagggatgcttccctggatcatagcttggtcagtcctacacagagatcaaactcgcatggtggtttggcagagcgcagggctgcgagggctggtttcagtgtcccgaaaatcgatacatcccgtggtggttcatccacagtaattcgatcgcccgtggcaattccaccaggtcttagtccaacaacacttctcgagtcaccggttttcctttacaacgcaatggcacagccttctccaaccactggcacactgccatttttgatggcttcaaatgctaagtcaacaataccgtcagctaccaagatggacgaagattgcacatttggcaatgacactttctccttccaaccgcatgtagggtcgagacggccaaatttctccgctgcagaaaagggtcccaatgcttgtcaccaaaaccaatcgctgtcgaatatccatcagcgggaatccagtcttcagtcaagctttactgcagtcaaagatatcactgatgaaaaaaacattaaaacaaagacatctgactccatgtttggtgataaccactcttctgatgaacaagatgatgagactaaccaaaatggagaaaactctatgccacctccgaaccaccgttcaggtgtccctctgtcacataccaatgatccagaagtgaatgtcctagagaaccgcggttcacagacatgccataactctgcatccttgtgggacaatgccaaaaatgattgccttcaagatgttcaaagtgaagttattgaaacaagaacagctgcttgtcttccagtatcaaccaattgtgatacatctatcatggagtcccaagatgcagttgatgtgtcgtcaacactatctaatgaggaggatgatagggcaacgcatggcacggcttctatagagtgcaacggggatggagatgagactgattccaagagaaggaagctggatgctttgacagctgcaactgctgctattaccaccaccagtaacattgacatgggagctgcggcatcgagaggtgtccgggagcctcgtgttgttgttcagacaacaagtgaggttgacatccttgatgacggttaccgctggcgcaagtatggacagaaggttgttaaaggaaatccaaacccaaggagctattacaaatgtacgcaccaagggtgttcggtgcgcaagcacgtggagagagcatcgcatgatctaaaatccgtcatcacgacgtacgaggggaagcacaaccatgaagttccagctgccagaaatagtggacatgggagctctggatctggaaacgctccatctgcaccgcaatctaacggctctcagcgcaggcaagaacaagggcaagccagcttcagccagtttggtggcgcggctcccttcagctccttcgttctcccaccaagaaaccaatttggaccatcggcgagcaatttcccctttgggatggtcccgccaggcatggcgattcccatgccatctctagggtctcttgctccagcaaagatggctggtcatccatccaccatgcagggctaccaggggctcatgattccggaaggagagatgaagacagagcccatgtcgcagctcggcttccccgcggtaaaccaatcttcatcatccttccaacagatgatgaacaggcctccatcatttggacctcagatgtaa

SEQ ID NO: 196 - protein, 623 aa, Oryza sativa
MEDWMPPPTPSPRTLMSSFLNEDFVSGSFSNIFSDHESNKPQDQFERNRELVDLSKEVPSQFARPAFQRDASLDHSLVSPTQRSNSHGGLAERRAARAGFSVPKIDTSRGGSSTVIRSPVAIPPGLSPTTLLESPVFLYNAMAQPSPTTGTLPFLMASNAKSTIPSATKMDEDCTFGNDTFSFQPHVGSRRPNFSAAEKGPNACHQNQSLSNIHQRESSLQSSFTAVKDITDEKNIKTKTSDSMFGDNHSSDEQDDETNQNGENSMPPPNHRSGVPLSHTNDPEVNVLENRGSQTCHNSASLWDNAKNDCLQDVQSEVIETRTAACLPVSTNCDTSIMESQDAVDVSSTLSNEEDDRATHGTASIECNGDGDETDSKRRKLDALTAATAAITTTSNIDMGAAASRGVREPRVVVQTTSEVDILDDGYRWRKYGQKVVKGNPNPRSYYKCTHQGCSVRKHVERASHDLKSVITTYEGKHNHEVPAARNSGHGSSGSGNAPSAPQSNGSQRRQEQGQASFSQFGGAAPFSSFVLPPRNQFGPSASNFPFGMVPPGMAIPMPSLGSLAPAKMAGHPSTMQGYQGLMIPEGEMKTEPMSQLGFPAVNQSSSSFQQMMNRPPSFGPQM

SEQ ID NO: 197 - DNA, 984 bp, Oryza sativa
atggaggggctgcacgaggttgggccgccgccgttcctgacgaagacgtacgacctggtggaggacccggccaccgacggcgtcgtgtcgtggagccgcgcgggcaacagcttcgtcgtctgggacccgcacgtcttcgccgacctcctcctcccgcgcctcttcaagcacaacaacttctccagcttcgtccggcagctcaacacctacggcttcagaaaggtcgatcctgataggtgggagtttgcaaatgagggttttctcaggggccaaaggcatctcctgaaaacgataaagagaaggaagcccccgtccaatgcacctccgtcacaacaacagtccctcacatcttgtctggaagttggtgagtttggattcgaggaagaaattgacaggctgaagcgtgataagaacatcttgatcacagaggtagtaaagctaaggcaggagcagcaggccactaaagatcatgtgaaagccatggaagataggctacgagccgctgagcagaaacaggtccagatgatggggttcttggcaagagcaatgcgcaacccagagttcttccagcagttggcacagcagaaagagaagaggaaggagcttgaggatgccatctcgaagaaaagaaggcggcctatagacaatgttccattctatgaccctggggaaacaagtcagactgagcaacttgattcgccgtatttgtttgattcaggtgtgcttaatgagttaagtgaacctggaatccctgagctggagaatctcgcagtgaacattcaggatctggggaagggtaaagtagatgaagagaggcagaatcaaactaatggtcaggcagagctcggagatgacttctgggcagagctgttggttgaagatttcacaggcaaggaggagcagtcagagttggatggcaaaattgacggcatcgacgaactggctcaacagttggggtatctgagctctactagtccaaaatag

SEQ ID NO: 198 - protein, 327 aa, Oryza sativa
MEGLHEVGPPPFLTKTYDLVEDPATDGVVSWSRAGNSFVVWDPHVFADLLLPRLFKHNNFSSFVRQLNTYGFRKVDPDRWEFANEGFLRGQRHLLKTIKRRKPPSNAPPSQQQSLTSCLEVGEFGFEEEIDRLKRDKNILITEVVKLRQEQQATKDHVKAMEDRLRAAEQKQVQMMGFLARAMRNPEFFQQLAQQKEKRKELEDAISKKRRRPIDNVPFYDPGETSQTEQLDSPYLFDSGVLNELSEPGIPELENLAVNIQDLGKGKVDEERQNQTNGQAELGDDFWAELLVEDFTGKEEQSELDGKIDGIDELAQQLGYLSSTSPK

SEQ ID NO: 199 - DNA, 1740 bp, Oryza sativa
  misc_feature (246)..(246): r = adenine or guanine
atggcggcgtccttgcttcttgagctggcggcagcggacgacgtggcggcggtgaggagggtcgtggaggaggagaaggtgtctcttggcgtggctgggttgtggtatgggccttcggcgagcggcgtggcgaggctcgggatggagcggaggacggcggcgatggtggcggcgctgtacgggagcacgggggtgcttgggtatgtcgtggcggcagcgccggcggaggccgcgcgcgcgtcggaracggatggggccacgccgctgcacatggcggctgccggtggcgcggcgaacgcggtcgcggccacgcgcctgttgctcgccgcgggggcgtcggtcgacgcgctctcggcttcggggctccgcgccggtgacctcctcccgcgcgccaccgcggcggagaaggccatccggctgctgctcaagtcgccggccgtgtcgccgtcgtcgtcgccgaagaagtcggcctcgccgccgtcgccgccgccgccgcaggaggcgaagaaggagtacccgcctgacctgacgctgcccgacctcaagagcggactgttcagcaccgacgagttccgcatgtacagcttcaaggtgaagccgtgctcccgcgcctactcccatgactggaccgagtgccccttcgtccaccccggcgagaacgcgcgccgccgcgaccctcgccgctactcctacagctgcgtgccttgcccggagttccgcaagggcggctcgtgccgcaagggcgacgcgtgcgagtacgcccatggcgtgttcgagtgctggctccacccggcgcagtacaggacgcgcctctgcaaggacgaggtcggctgcgcgcgccgcatctgcttcttcgcccacaagcccgacgagctccgcgccgtcaacccctccgccgtgtccgtcggcatgcagcccaccgtatcgtcgccgcgctcctcgccgcccaacgggctcgacatggcggcggcggcggcggcgatgatgagccccgcctggccgtcgtccccagcgagccgcctcaagacggcgctcggcgcgcgggagctcgacttcgacctcgagatgctcgcgctggaccagtaccagcagaagctgttcgacaaggtgtccggcgcgccgtcgccgagggcgagctggggcgccgcggcgaacggcctcgccaccgcgtcgccggcgagggccgtgccggactacaccgacctgctcggctccgtcgacccggccatgctgtcccagctccacgcgctgtccctcaagcaggccggcgacatgcccgcgtacagctccatggcggacaccacgcagatgcacatgccgacctcgccgatggtgggcggcgcgaacaccgcgttcgggctggaccactccatggcgaaggcgatcatgagctcccgcgcctcggcgttcgccaagcgcagccagagcttcatcgaccgcggaggccgcgccccggcggcgcgttcgctcatgtcgccggcgacgaccggcgcgccgtccattctctcggactggggctcgccggacggcaagctggactggggcgtccagggcgacgagctgcacaagctccgcaagtcggcgtcgttcgcgttccgcggccaatccgccatgccggtggcgacgcacgccgcggcggcggagccggacgtgtcatgggtgaactctcttgtcaaggacggccacgccgccggcgacatattcgcgcagtggccggagcaggagcagatggtggcatga

SEQ ID NO: 200 - protein, 579 aa, Oryza sativa
MAASLLLELAAADDVAAVRRVVEEEKVSLGVAGLWYGPSASGVARLGMERRTAAMVAALYGSTGVLGYVVAAAPAEAARASDTDGATPLHMAAAGGAANAVAATRLLLAAGASVDALSASGLRAGDLLPRATAAEKAIRLLLKSPAVSPSSSPKKSASPPSPPPPQEAKKEYPPDLTLPDLKSGLFSTDEFRMYSFKVKPCSRAYSHDWTECPFVHPGENARRRDPRRYSYSCVPCPEFRKGGSCRKGDACEYAHGVFECWLHPAQYRTRLCKDEVGCARRICFFAHKPDELRAVNPSAVSVGMQPTVSSPRSSPPNGLDMAAAAAAMMSPAWPSSPASRLKTALGARELDFDLEMLALDQYQQKLFDKVSGAPSPRASWGAAANGLATASPARAVPDYTDLLGSVDPAMLSQLHALSLKQAGDMPAYSSMADTTQMHMPTSPMVGGANTAFGLDHSMAKAIMSSRASAFAKRSQSFIDRGGRAPAARSLMSPATTGAPSILSDWGSPDGKLDWGVQGDELHKLRKSASFAFRGQSAMPVATHAAAAEPDVSWVNSLVKDGHAAGDIFAQWPEQEQMVA

SEQ ID NO: 201 - DNA, 1152 bp, Oryza sativa
  misc_feature (78)..(78): y = cytosine or thymine
  misc_feature (154)..(154): s = guanine or cytosine
  misc_feature (226)..(226): k = guanine or thymine
  misc_feature (242)..(242): k = guanine or thymine
atggcggcgtccgggcgagccgccgtcacgggcgccgtccacgtcgccgcctactccgacggctacgacgccggcggytcacgaggccgcagcgccggcgagtacctgtcccggctggagtcgcgcgggtcggacaccatggacgcgctcttcsgcgccgaggcggagcagggccggccggtggacgcggtggtgtacgactcgttcctgagctgggcgccgcgcktggcggcgcgccacgktgcggcgaccgcgtccttcttcacgcaggcgtgcgcggtgaacgcggcgtacgagagcgtgttcacgggccgggtcgagctgccgctcgccgccgacggcgaggagccgctacggctgcccgggatttccgtcggcctcacgctggacgacgtgccgacgttcatggcgaacacggaggacagcccggcgtacctcgacctcctggtgaaccagttcaagggcctggacatggccgaccatgtcctcgtcaactccttctacgagctccagccacaggaagcggagcacatggcgtcggcgtggcgggccaagacggtggggctgaccgtgccatcggcgtacctcgacaaccgcctcccggacgacacgtcgtacggcttccacctcttctcgccgacgacggagacgaaggcctggctggaggcgagaccaccgcgcaccgtggcgtacgtctccttcggcagcgtggcgacgccgagcccggcgcagatggccgaggtggcggagggtttgtacaacaccggcaagcccttcctctgggtggtgagggcatcggaaacctccaagataccggaaggcttcgccgccaaggcggcgaagcaagggagagggctcatcgtgacgtggtgcccgcagctggaggtgctggcacacccagctgtggggtgcttcgtgacgcactgcgggtggaactcaacgacagaggggttgagtgccggtgtaccaatggtggcggtaccgcagtggtcagaccagacaatgaatgccaagtacattgaggacgtgtggcgtgttggggtgcgggtgcggcccgacggcgagggggtggtgaggaaggaggagttggagaggtgtgtgagggaggtgatggaaggggagaggagcaaggagtttcatggagaatgctaa

SEQ ID NO: 202 - protein, 383 aa, Oryza sativa
MAASGRAAVTGAVHVAAYSDGYDAGGSRGRSAGEYLSRLESRGSDTMDALFRAEAEQGRPVDAVVYDSFLSWAPRLAARHAAATASFFTQACAVNAAYESVFTGRVELPLAADGEEPLRLPGISVGLTLDDVPTFMANTEDSPAYLDLLVNQFKGLDMADHVLVNSFYELQPQEAEHMASAWRAKTVGLTVPSAYLDNRLPDDTSYGFHLFSPTTETKAWLEARPPRTVAYVSFGSVATPSPAQMAEVAEGLYNTGKPFLWVVRASETSKIPEGFAAKAAKQGRGLIVTWCPQLEVLAHPAVGCFVTHCGWNSTTEGLSAGVPMVAVPQWSDQTMNAKYIEDVWRVGVRVRPDGEGVVRKEELERCVREVMEGERSKEFHGEC

SEQ ID NO: 203 - DNA, 528 bp, Oryza sativa
atggcgatcagtagtgttgcccgtgctgcaatagtaatcttgtgtctcgtcgccctcacaaaccttgcgcaagcccagaactcgccgcacgacttcctgcaaccccacaacgccgcgcgcgcggaggtcggtgtcggcaagctctcctgggacggcaccctcgccgcgtacgcgcggaggtacggcgagaagaggtcccacgactgcacgctcaagcactcccgtgggccgtatggggagaacatctaccggggcagcgccgggcggcggcggacggccgcggacgcggtggcgcggtgggtccgcgagagcgcctactacgactgcgggagcaacacctgcgtgccggggcggctttgcgggcactacacgcaggtcacgtgggcacggaccacgaggctcgggtgcgccgccgtgacgtgcgatagcggcgccacgttcgtggtgtgtagctacgatccaccgggcaacaccaacgggagaggtccgtaccctggatgtggggattatgatgtcgtgtccgaatag

SEQ ID NO: 204 - protein, 175 aa, Oryza sativa
MAISSVARAAIVILCLVALTNLAQAQNSPHDFLQPHNAARAEVGVGKLSWDGTLAAYARRYGEKRSHDCTLKHSRGPYGENIYRGSAGRRRTAADAVARWVRESAYYDCGSNTCVPGRLCGHYTQVTWARTTRLGCAAVTCDSGATFVVCSYDPPGNTNGRGPYPGCGDYDVVSE

SEQ ID NO: 205 - DNA, 1629 bp, Oryza sativa
atgctcaccgtcgacgaggccaaggaggccaacctggtggagaacgacgaggagaagggggttcctcgcccgaggccgaggcccaagaagaagcgacgcacggagaaaggcagcgtcgtcatcgccgccaccgccgccgccgacggggagctgcagaagccgcagggaacgacgccggagacgaacgtggagggagaggatcaggctcctcctcgcccaaagccggtgccgaagaagaagaagcgacgaacggagaaaggcagcgtcgacgtcgccgacggtgagcagcagcagcagcagaaggggagggagaaggagccgaggaagaaggcgcaggggaaggaccacggcggggtgccggtgacggtgctgcacctgagcggcgccatgaaggagctgcggctggtgctctgggacagcagccatggcaccatcatcaaggggaccggctacatggacttcatcgccggaaccggcctgagggagcacgacgccgtgcagatctgggccttcaagcgccgcgggttccgcctcttcggcgccaccgtgccggagagccgcttctacctggtgatcgtcggcgtggtaggcgacgtacccgtcgacagcgagacgcctacggtgacttcatcaatctctccaggatttgccggcccagtcttcgaagatgctcataggagtagggtttgcctgcctgcgttcataggggtaaaacagcatcagtacaagtttaatttcctcgagccccagtgcggcacgatcattccttgcacgaacacgtatgatccaccaagtccgcgatccgttgaaaacttgaaacggcctcacgggcagtgtcaacaagagcgaacgtaccaggttttgttctggtgcgcatatcctgtacaaatccgggaatcgcgtactctcacaatttattttctactaataataagaaactccagtatacccgctgaacttcacgatccgttcaatctaccgagatcagtggacttgaaagtctacacagtagtacagtaccactcgtatatccgcccaaatttttgggttcacactcggcggcacactcgaagctcccaacaaccaaccaaaccccaaagcatatcacaatcagcaggcaacacaagaatcatccgggagagcgacatggccccggttgccgtgggcgacaccctccccgacggccagctggggtggttcgacggggaggacaagctgcagcaggtctccgtccacggcctcgccgccggcaagaaggtcgtcctcttcggcgtccccggtgccttcaccccgacctgcagcaatcagcatgtgccaggattcataaatcaggctgagcagctcaaagccaagggtgtagacgacatcttgcttttaacgacccctttggtcatgaaggcatgggcaaagtcataccctgagaataagcatgtgaaattccttgccgatggtttgggaacatacaccaaggcacttggtcttgagcttgacctttcggagaaagggcttggtattcgttcgagacggtttgctctccttgctgacaacctcaaggttactgttgcaaacattgaggaaggtggccaattcacaatctctggtgctgaggagatcctcaaggcactgtaa

SEQ ID NO: 206 - protein, 542 aa, Oryza sativa
MLTVDEAKEANLVENDEEKGVPRPRPRPKKKRRTEKGSVVIAATAAADGELQKPQGTTPETNVEGEDQAPPRPKPVPKKKKRRTEKGSVDVADGEQQQQQKGREKEPRKKAQGKDHGGVPVTVLHLSGAMKELRLVLWDSSHGTIIKGTGYMDFIAGTGLREHDAVQIWAFKRRGFRLFGATVPESRFYLVIVGVVGDVPVDSETPTVTSSISPGFAGPVFEDAHRSRVCLPAFIGVKQHQYKFNFLEPQCGTIIPCTNTYDPPSPRSVENLKRPHGQCQQERTYQVLFWCAYPVQIRESRTLTIYFLLIIRNSSIPAELHDPFNLPRSVDLKVYTVVQYHSYIRPNFWVHTRRHTRSSQQPTKPQSISQSAGNTRIIRESDMAPVAVGDTLPDGQLGWFDGEDKLQQVSVHGLAAGKKVVLFGVPGAFTPTCSNQHVPGFINQAEQLKAKGVDDILLLTTPLVMKAWAKSYPENKHVKFLADGLGTYTKALGLELDLSEKGLGIRSRRFALLADNLKVTVANIEEGGQFTISGAEEILKAL

SEQ ID NO: 207 - DNA, 905 bp, Oryza sativa
atgaggacggtggcgcttggcattgtggcgatggcctgcctggtggccattgcgcatggaggcaacttcttccaggacgcggaggtgtcgtgggggcagggccgcggcaagatcgtcgatggtggccgtgggctcgacctcacgcttgacaggagctccggctctgggttccagtccaagagcgagtacctcttcggcaagatcgacatgcagatcaagctcgtccccggcaactccgccggcaccgtcaccaccttctacttgtcgtcgcagggttcgacccacgatgagatcgacttcgagttcctggggaacgtgaccggcgagccgtacacgctgcacaccaacgtgttcacgcaggggcaggggcagcgcgagcagcagttccgcctctggttcgaccccacccagtccttccacacctactccatcatctggaacccacagcacgtcatttcgcggtggacgggacaccgatcagggacttcaagaaccacgaggcccgtggcgtggcgttccccaagagccagccgatgcgggtgtacgcgagcctgtggaacgcggacgactgggcgacgcagggcggccgcgtcaaggcggactggagcaaggcccccttcgtcgcctccttccgcgacttcaacgccgacgcctgcgtctggtcgaacggcgcgcagcgctgccccgtcggcacaatggagaccgttgcagcgggcgccggcgggtggtggaaccaggagctcagcgacatgagctaccgccgcatgaggtgggtgcagaggaagttcatgatctacaactactgcactgacgccaagcggttcccccagggcacccccgccgagtgcaagctccgttgagatcgacacgagaagatgatcataacgtacgctacgcatgcatga

SEQ ID NO: 208 - protein, 286 aa, Oryza sativa
MRTVALGIVAMACLVAIAHGGNFFQDAEVSWGQGRGKIVDGGRGLDLTLDRSSGSGFQSKSEYLFGKIDMQIKLVPGNSAGTVTTFYLSSQGSTHDEIDFEFLGNVTGEPYTLHTNVFTQGQGQREQQFRLWFDPTQSFHTYSIIWNPQHVIFAVDGTPIRDFKNHEARGVAFPKSQPMRVYASLWNADDWATQGGRVKADWSKAPFVASFRDFNADACVWSNGAQRCPVGTMETVAAGAGGWWNQELSDMSYRRMRWVQRKFMIYNYCTDAKRFPQGTPAECKLR

SEQ ID NO: 209 - DNA, 1794 bp, Oryza sativa
  misc_feature (334)..(334): k = guanine or thymine
  misc_feature (338)..(338): m = adenine or cytosine
atggcgctctcctgcatgaggtgctccccggccgccggcgccgtacgacgaggattggcatcggcggctccgccggcggcgctctccttcgccagatgcggcctccgtagagcggccgcgctcgggtggcgcgtcgccgccgtcaccactacgggagtgcaaggtgccaaggatgctggtctggagaaggctgccagaagtgcttcccaatcaaaggtggaaaatggctcaccttcagaaatcattttagatgattttgaagacttgagccctctatcagaaaatgatgactccactgttagtatcactgtagtcggagcatctggtgaccttkccamgaagaagatatttcctgcactttttgctctatactatgaagattgtcttccaaaggttgtcaagatgacagatgctgaattgagaaacatggtcagcaaaacactgacatgcagaatagataaaaggtgcttaactaggctggacttattaaccataattcttaacatccttagggaaaactgtaatgagaagatggaagagtttttaaagagatgcttctatcattcaggccaatatgattcagaggagcatttcatggaccttgacaagaagctgaaacaacatgagggttccagagtttctaaccgtcttttctacttgtcaataccaccaaatatattccttgatgttgtaaaatgtgcaagcaaatcagcatcatctgggaatggttggacaagggtaattgttgagaaaccttttggtcgtgactcagattcatcttctgcattaacaaggggtctgaagcagtacctggtagaggaccaaatcttcaggtggattgaccactacttgggaaaggaactagtggagaacctgtctgtccttcgcttctcaaatcttgtttttgaacctctatggtcaaggcagtatataaggaatgtgcagctgatattctcagaggatttcggcactgaaggacgaggagggtactttgataggtatggtattatccgtgacataatgcagaatcatcttcttcagatactagccctatttgcaatggaaactcctgttagcttggaggcagaggacataagaaacgaaaaggttaaagttctgcgttccatgaagcccctgcaactggaagatgtggtgataggacagtacaaaagtcatacaaagggtggtaccacataccctggatacactgaagataagacggtgcccaaggatagtgtaaccccaacatttgctgcagctgcacttttcataaataatgctagatgggatggagttccttttcttatgaaagctgggaaggctttacatacaaagggggctgagattagagtacagttccgacatgttcctggtaatctttataagaggagttttgggactgatcttgatacagccactaatgaacttgtcatacgtgtgcaacctgatgaagctatctacttgaagattaacaacaaaattcctggtcttggtatgagactagatagaagtaatttgaatcttcactatgcagcaaggtactccaaggagataccagatgcttatgagaggctcttacttgatgccattgaaggagagcgaaggctttttatccgttctgatgagttggatgccgcatgggagctcttcactcccttactcaaggagctggaagagaagcggatagcccctgagctatacccttatggaagccgcggtcctgtaggggctcactaccttgcagcaaagtacaacgtcagatggggtgatttgaccacagaacagaaggcatga

SEQ ID NO: 210 - protein, 597 aa, Oryza sativa
MALSCMRCSPAAGAVRRGLASAAPPAALSFARCGLRRAAALGWRVAAVTTTGVQGAKDAGLEKAARSASQSKVENGSPSEIILDDFEDLSPLSENDDSTVSITVVGASGDLPKKKIFPALFALYYEDCLPKVVKMTDAELRNMVSKTLTCRIDKRCLTRLDLLTIILNILRENCNEKMEEFLKRCFYHSGQYDSEEHFMDLDKKLKQHEGSRVSNRLFYLSIPPNIFLDVVKCASKSASSGNGWTRVIVEKPFGRDSDSSSALTRGLKQYLVEDQIFRWIDHYLGKELVENLSVLRFSNLVFEPLWSRQYIRNVQLIFSEDFGTEGRGGYFDRYGIIRDIMQNHLLQILALFAMETPVSLEAEDIRNEKVKVLRSMKPLQLEDVVIGQYKSHTKGGTTYPGYTEDKTVPKDSVTPTFAAAALFINNARWDGVPFLMKAGKALHTKGAEIRVQFRHVPGNLYKRSFGTDLDTATNELVIRVQPDEAIYLKINNKIPGLGMRLDRSNLNLHYAARYSKEIPDAYERLLLDAIEGERRLFIRSDELDAAWELFTPLLKELEEKRIAPELYPYGSRGPVGAHYLAAKYNVRWGDLTTEQKA

SEQ ID NO: 211 - DNA, 843 bp, Oryza sativa
atgctggcgttcctggctcttgggctagcgctcctcctctccgccaccggccaggcgagcgcgcagaactgcggctgccagtcgaacatgtgctgcagcaaatgggggtactgcggcacgggcaaggactactgcggagatgggtgccgctctggcccgtgctacggcggcggcggcggtggaggaggaggaggcggaggtggtggaggcggaggcggaggcagcggcgtgtctgtagagagcgtggtcaccgaggcgttcttcaatgggatcaagaaccaggccccgaacggttgcgccggcaagaacttttacacacgacagtcgtttcttaacgctgcccactcctactcgggcttcgccagggaccgcaccaacgatgactccaagcgtgagatcgctgccttctttgcccacgtcactcatgagaccggacatatgtgctacatcaacgagataaacggggcgagcatggactactgcgacaagaacaacaagcagtggccgtgccagccggggaagaagtactacgggcgcgggccgctgcagatctcgtggaactacaactacgggcctgcggggcagaacatcgggttcgacgggctgagggacccggacagggtggcgcaggacccgacgatctccttcaagacggcgctctggttctggatgaacaacgtgcaccaggtgatgttgcaggggttcggcgccaccatccgggccatcaacggtgcgctcgagtgcaacggcaagaaccccggcgccgtcaacgcaagggtaaactactacaaagactactgccgccaattcggcgttgacccgggtggcaacctttactgttga

SEQ ID NO: 212 - protein, 280 aa, Oryza sativa
MLAFLALGLALLLSATGQASAQNCGCQSNMCCSKWGYCGTGKDYCGDGCRSGPCYGGGGGGGGGGGGGGGGGGGSGVSVESVVTEAFFNGIKNQAPNGCAGKNFYTRQSFLNAAHSYSGFARDRTNDDSKREIAAFFAHVTHETGHMCYINEINGASMDYCDKNNKQWPCQPGKKYYGRGPLQISWNYNYGPAGQNIGFDGLRDPDRVAQDPTISFKTALWFWMNNVHQVMLQGFGATIRAINGALECNGKNPGAVNARVNYYKDYCRQFGVDPGGNLYC

SEQ ID NO: 213 - DNA, 1951 bp, Oryza sativa
atggcgggcaagggcgagggtccggccatcggcatcgaccttggcacgacctactcgtgcgtgggcgtttggcagcacgaccgcgtggagatcatcgccaacgaccagggcaaccgcaccaccccctcctacgtcggcttcaccgactccgagaggctcatcggagatgctgccaagaaccaggtcgccatgaaccccatcaacaccgtctttggatgccaagcgtctcattggcaggaggtttagcgatgcttctgttcagagtgacattaagctctggcccttcaaggtgattgctggacctggtgacaagcctatgattgttgtccagtacaagggtgaggagaagcagtttgctgcagaagagatctcctccatggtcctcatcaagatgcgtgagattgctgaggcctaccttggcaccaccatcaagaatgccgttgtcactgttcctgcctacttcaatgactcccagaggcaggccaccaaggatgctggagtgattgctggtctcaatgtcatgcgtatcatcaacgagccgactgctgcagctattgcctatggtcttgataagaaggccaccagcgttggtgagaagaatgtcctcatctttgaccttggaggtggtacctttgatgtctccctccttaccattgaggagggtatctttgaggtcaaggccacagctggtgacacccatcttggtggtgaagattttgacaatcgtatggtcaaccactttgtgcaagaattcaagaggaagaacaagaaggatatcactggcaaccccagggctctcaggaggttgaggacagcttgtgagagggcaaagaggaccctgtcctccactgcccagaccaccattgagatcgattccctgtatgagggcatcgacttctactcaaccatcacccgtgccaggtttgaggagctcaacatggatctcttcaggaagtgtatggagcctgtggagaagtgcctcagggatgctaagatggacaagagctctgttcatgatgttgtccttgttggtggctccactaggatcccgagggtgcagcagctcctgcaggatttcttcaacggcaaggagctttgcaagaacatcaacccagatgaggctgttgcttatggtgctgctgtccaggctgccatcttgagtggtgagggcaacgagaaggtccaggacctcctcctgttggatgttacccctctctctctcggtttggagactgctggtggtgtcatgaccgttttgatcccaaggaacaccaccattcccaccaagaaggagcaggtcttctccacctactccgacaaccagcctggtgtgctcatccaggtttatgagggtgagaggaccaggacacgtgacaacaacctgctggggaagtttgagctctctggaatccctcctgctcccaggggtgttccacagatcactgtttgcttcgacattgatgccaatggtatcctgaacgtgtctgctgaggacaagaccaccgggcagaagaacaagatcaccattaccaacgacaagggcaggcttagcaaggaggagattgagaagatggtccaggaggccgagaagtacaagtcagaggatgaggagcacaagaagaaggtggagtccaagaacgcgctggagaactacgcctacaacatgcgcaacaccatcaaggatgagaagatcgcctcgaagctcccggcagcggacaagaagaagatcgaggatgccatcgaccaggccatccagtggctggacggcaaccagctcgctgaggctgatgagttcgatgacaagatgaaggagctggagggcatctgcaaccccatcatcgccaagatgtaccagggcgctggcgcggacatggccggcggcatggacgaggacgatgctcccccggctggcggcagcggtgctggccccaagatcgaggaggtcgactaa

SEQ ID NO: 214 - protein, 649 aa, Oryza sativa
MAGKGEGPAIGIDLGTTYSCVGVWQHDRVEIIANDQGNRTTPSYVGFTDSERLIGDAAKNQVAMNPINTVFDAKRLIGRRFSDASVQSDIKLWPFKVIAGPGDKPMIVVQYKGEEKQFAAEEISSMVLIKMREIAEAYLGTTIKNAVVTVPAYFNDSQRQATKDAGVIAGLNVMRIINEPTAAAIAYGLDKKATSVGEKNVLIFDLGGGTFDVSLLTIEEGIFEVKATAGDTHLGGEDFDNRMVNHFVQEFKRKNKKDITGNPRALRRLRTACERAKRTLSSTAQTTIEIDSLYEGIDFYSTITRARFEELNMDLFRKCMEPVEKCLRDAKMDKSSVHDVVLVGGSTRIPRVQQLLQDFFNGKELCKNINPDEAVAYGAAVQAAILSGEGNEKVQDLLLLDVTPLSLGLETAGGVMTVLIPRNTTIPTKKEQVFSTYSDNQPGVLIQVYEGERTRTRDNNLLGKFELSGIPPAPRGVPQITVCFDIDANGILNVSAEDKTTGQKNKITITNDKGRLSKEEIEKMVQEAEKYKSEDEEHKKKVESKNALENYAYNMRNTIKDEKIASKLPAADKKKIEDAIDQAIQWLDGNQLAEADEFDDKMKELEGICNPIIAKMYQGAGADMAGGMDEDDAPPAGGSGAGPKIEEVD

SEQ ID NO: 215 - DNA, 1059 bp, Oryza sativa
  misc_feature (223)..(223): r = adenine or guanine
  misc_feature (264)..(264): r = adenine or guanine
atgatcttcccccctgccttcctggattcctcgagctggaatgataacaacaacaacaaccacaaccagcagcagcagcagcaacatgctcacggccaccaccagcatcatcaggtcgccgccggttgtggaggcggcggcggcggcggcgacggcaatagccatgagcttctgcagcagcagtcaatgattccgggcacgcttgccgatggcggcggcggargcggcgcggtggggccggcgaagccgatgtcgatgtcggaragggcgcggctggcgaggatcccgctgccggagccggggctcaagtgcccgcgctgcgattccaccaacaccaagttctgctacttcaacaactactccctttcccagccccgccacttctgccgcgcctgccgccgctactggacccgcggcggcgcgctccgcaacgtccccgtcggcggcggctaccgccgccacgccaagcgcgccaagcccaagccggcgtccgcggcgggctccgcctcagccgccaccaccaccgccggctcgacgccagcggggtcgacgacgacgacgacgacgtcctccacctgcgccacgcccaacgcgcccgccctcccggcgatgctgggcggcaacctctccatcctgccgccgctgctccgcctcgccgacttcgacgccatgagcctcggctccaccttctctggcatggcggcggccgccggcaagccaccgcccgtcgacgcggccggctgctactccgtcggcgccgccaccggcctcgagcaatggagactacagcagatgcagagcttcccgttcttccacgccatggatcaccaggcggcgatggcggcgccaccgccggcaatggcaatgccggggatgttccagctaggcctagacggcgacggccatggcagcggcggcggcgaagacggtggagagctccaccatgcgatgccatcatcgaagagagaaggctacccaaggggcatgtatggcgatcatcacctcgctggaggatacacctcctactccagtgcaaccacaggtaaccatctcttgtaa

SEQ ID NO: 216 - protein, 352 aa, Oryza sativa
MIFPPAFLDSSSWNDNNNNNHNQQQQQQHAHGHHQHHQVAAGCGGGGGGGDGNSHELLQQQSMIPGTLADGGGGRGAVGPAKPMSMSDRARLARIPLPEPGLKCPRCDSTNTKFCYFNNYSLSQPRHFCRACRRYWTRGGALRNVPVGGGYRRHAKRAKPKPASAAGSASAATTTAGSTPAGSTTTTTTSSTCATPNAPALPAMLGGNLSILPPLLRLADFDAMSLGSTFSGMAAAAGKPPPVDAAGCYSVGAATGLEQWRLQQMQSFPFFHAMDHQAAMAAPPPAMAMPGMFQLGLDGDGHGSGGGEDGGELHHAMPSSKREGYPRGMYGDHHLAGGYTSYSSATTGNHLL

SEQ ID NO: 217 - DNA, 747 bp, Oryza sativa
atggatcgtcaccatcaccaccaccaccaccaccaccatcacatgatgtcgggcggcgggcaagacccggcggcgggggacggcggcgccggcggcgccacgcaggacagcttcttcctcggcccggccgcggccgccatgttctccggcgccgggtcgtcgtcgtcgggcgcggggacgtcggcgggaggcggcggcggcgggccatcgccgtccagctcgtcgccgtcgctgagccggtacgagtcgcagaagcggcgggactggaacacgttcgggcagtacctgcggaaccaccggccgccgctgtccctgtcgcggtgcagcggcgcgcacgtgctggagttcctcaagtacatggaccagttcgggaagacgaaggtgcacacgccggtgtgccccttctacggccaccccaaaccgccggcgccatgcccgtgcccgctccgccaagcctggggctccctcgacgcgctcatcggccgcctccgcgccgcctacgaggagaacggcggcacgccggagatgaaccccttcggcgcccgcgccgtccgcctctacctgcgcgaggtgcgcgagacgcaggccagggcgagggggatcagctacgagaagaagaagcgcaagaagccctcgtccgccggcgccggagccgggccctcgtccgaggggagcccgccgccacccggcggctcggccagcggcggcggcgacacgtcggcgtcgccgcagttcatcatcccgtga

SEQ ID NO: 218 - protein, 248 aa, Oryza sativa
MDRHHHHHHHHHHHMMSGGGQDPAAGDGGAGGATQDSFFLGPAAAAMFSGAGSSSSGAGTSAGGGGGGPSPSSSSPSLSRYESQKRRDWNTFGQYLRNHRPPLSLSRCSGAHVLEFLKYMDQFGKTKVHTPVCPFYGHPKPPAPCPCPLRQAWGSLDALIGRLRAAYEENGGTPEMNPFGARAVRLYLREVRETQARARGISYEKKKRKKPSSAGAGAGPSSEGSPPPPGGSASGGGDTSASPQFIIP

SEQ ID NO: 219 - DNA, 689 bp, Oryza sativa
  misc_feature (404)..(404): y = cytosine or thymine
atggaggcggcggcggaggaggagaggctgaggtatctggagttcgtgcagcaggcggcggcgcaggtgctggtgctggcggcggcggcgtacgcgtacgccaagcagggcgccggcccgctccgccccggtgttgaccacgtcgagggcaccgtcaaggccgtcgtcggccccgtctacgaaccgcttccatggcgtccccctcgacctcctcaagttcctcgaaccgcaaggttggtgagtccgtccaggagctggaccgccgcgtgccgccggtggtgaaggaggcgccgggcctggcccgctcggcggcggcggaagtgcggcaagcggggctcgtcggcacggcgacggggctggccaagtcggcgatcgcccgcgccgagcccagggcgcgggacctytacacccggtacgagcccgtggcggagcgcaaggcggcggaggcgtgggcggcgctgaaccgcctcccgctcgtgccgtcggtgacccgcgccgtgctccccgccgccgcgagcctctcggcgaggtacaacacggcagtggccgacggcgccaagcgcggcagcgccgtcgccacctacctcccgctcgtccccaccgagcgcctctccagggtgttcggctacccgctcgccgacgccgccacctcgccggcgccggagatgcagcccatcccgtcgcagtaa

SEQ ID NO: 220 - protein, 228 aa, Oryza sativa
MEAAAEEERLRYLEFVQQAAAQVLVLAAAAYAYAKQGAGPLRPGVDHVEGTVKAVVGPVYNRFHGVPLDLLKFLERKVGESVQELDRRVPPVVKEAPGLARSAAAEVRQAGLVGTATGLAKSAIARAEPRARDLYTRYEPVAERKAAEAWAALNRLPLVPSVTRAVLPAAASLSARYNTAVADGAKRGSAVATYLPLVPTERLSRVFGYPLADAATSPAPEMQPIPSQ

SEQ ID NO: 221 - DNA, 1082 bp, Oryza sativa
  misc_feature (608)..(608): y = cytosine or thymine
atggatgctgtgttggttaccgccgccatcttcgggttgctgctctgcggctgctcggtttcagcaggagtggaaggtatcggtgtgaactatggcatgatcggcaacaacctcccgtcgccggacaaggtcatcgccctgtacagagccagcaacatcaccgacatccgcctcttccacccggacaccaccgtgctcgccgcgctccgcggctcgggcctcggcgtcgtgctcggcacgctcaacgaggacctggcacgcctcgccaccgacgcctcgttcgcggcgtcgtgggtccagtcgtacgtgcagcccttcgccggcgccgtccgcttccgctacatcaacgccggcaacgaggtcatccctggggacgaggcggcgagcgtcctcccggccatgaggaacctccagtcggcgctgcgcgccgcggggctcggcgtgccggtcacgacggtcgtcgcgacgtcggtgctgggctcctcgtacccgccgtcgcagggcgcgttctccgaggccgcgctgccgacggtggcgccgatcgtctccttcctggcgtcaagcgggacgcccctgctggtgaacgtgtacccgtacttcgcctactycgccgacccgtcgtcggtgcggctcgactacgcgctgctgtcgccgtcgacgtcggcggccgtgacggacggcggtgtcacgtacaccaacatgttcgacgccatcctggacgcggtgtacgcggcgctggagaaggcgggcgggcagggcctggaggtggtggtgtcggagaccgggtggccgtcgggcggcggcggggccggcgccagcgtggagaacgcggcggcgtacagcaacaacctggtgcgccacgtcgggcgcggcacgccgcggcggcccgggaaggccgtggagacgtacatcttcgccatgttcaacgagaaccagaagcccgagggcgtggagcagaacttcggcctgttccacccggacatgagcgcggtctaccacgtcgacttctcggcgtgatcatcttaatcaggcagcgacggcgggggcgacgctccatggatttggactcatcgtgtgcatga

SEQ ID NO: 222 - protein, 342 aa, Oryza sativa
  X_region (203)..(203): Xaa = any naturally occuring amino acid
  X_region (250)..(250): Xaa = any naturally occuring amino acid
  X_region (340)..(340): Xaa = any naturally occuring amino acid
MDAVLVTAAIFGLLLCGCSVSAGVEGIGVNYGMIGNNLPSPDKVIALYRASNITDIRLFHPDTTVLAALRGSGLGVVLGTLNEDLARLATDASFAASWVQSYVQPFAGAVRFRYINAGNEVIPGDEAASVLPAMRNLQSALRAAGLGVPVTTVVATSVLGSSYPPSQGAFSEAALPTVAPIVSFLASSGTPLLVNVYPYFAYXADPSSVRLDYALLSPSTSAAVTDGGVTYTNMFDAILDAVYAALEKAXGGQGLEVVVSETGWPSGGGGAGASVENAAAYSNNLVRHVGRGTPRRPGKAVETYIFAMFNENQKPEGVEQNFGLFHPDMSAVYHVDFSAXSS

SEQ ID NO: 223 - DNA, 1838 bp, Oryza sativa
  misc_feature (56)..(56): m = adenine or cytosine
  misc_feature (66)..(66): m = adenine or cytosine
atggacaccacgatcggctcggtgccgacggcctccgatgcggcggcgcctgcccmcgcggcgaamtccgcgccgagggaggccacgctggggcggcacctcgcgcggcggctggcggaggtcggggcgcgcgacgtgttcacggtgccgggggacttcaacctcacgctgctcgacgagctcgaggcggaggcgggggcggggcacggcggggtgcggctcgtcgggtgctgcaacgagctcaacgcggcgtacgccgccgacgggtacgcccgcgcgcgcggcggcggggtcggggcgtgcgccgtcacgttcaccgtcggtggcctcagcgccatcaacgccgtcgccggcgcgttcagcgagaacctccccgtggtgtgcatcgttgggggccccaacagcaacgactacgggagcaaccgcatcctgcatcacaccatcgggctgcctgatttcacgcaggagctcaggtgcttccagactgtcacttgctatcagcaggcggtggtgaacaacttggaggatgcacatgagcagattgatgctgccatctccactgcaataaaggagagcaagcctgtttacataagcatcagctgcaacctcccctctatcccacatcccacctttagccgccaccctgttcctttcttcctgtccccaagagattatcaaaccagatgaacctggaggcagcagtggaaactgctgcagctttcctgaacaaagcagtcaagccagtcctcgttggtggaccaaaaatgagggtggccaaagcatgcaaatccttcgtagagctggctgatgcctgtggttatcctgttgcggtcatgccttctgcaaagggtcttgtgccagagcaccatcctaggtttattggcacgtactggggtgctgtgagcactccattttgtgctgagatcgtcgagtcagctgatgcatatctatttgctggcccaatatttaatgactacagctcggttggatactcactacttctcaagaaggagaaggccatcatcgtccagccagaccgggtggtgataggtcatgggcctgcgtttgggtgtgttctgatgaaggacttcctgcatgcactttcagcacggctgaagaaaaacacggctgcatatgagaactatcgtcggatttatgtgcctccgggtgaacctcctttgtctgagcctggagagccattgagagtgaatgtacttttccagcatattcagaaaatgttgtcagccaactcggctgtcattgctgagactggagactcttggtttaattgccagaagctaaagctaccagagggctgtggggtacgaatttcaaatgcaatatggatcaattggttggtcggtaggtgcaactctgggatatgcaaaggctgctaaggataagcgagtcattgcttgcatcggagatggaagctttcagtcaggtgacggcacaagaagtgtcgacaatgcttcgttgggggcagaaaagcatcatcttcctcataaacaatggagggtacaccatcgaggtggagatccatgacggtccttacaatgtcatcaagaattggaactacaccggtgtggtggaagcgttccataatggcgaggggaagtgctacacggcaaagaggtccgaactgaggaggaactgaaggaagcaattgaagaagctcagggacctaagaaggattgcttgtgcttcatagaggtgattgtacacaaggatgacacaagtaaggagcttcttgagtggggctccagagtttctgctgcaaatagccgcccaccaaatcctcagtgagtacgtcagatatccgacttgccatgttttga

SEQ ID NO: 224 - protein, 601 aa, Oryza sativa
  X_region (19)..(19): Xaa = any naturally occuring amino acid
  X_region (22)..(22): Xaa = any naturally occuring amino acid
  X_region (223)..(223): Xaa = any naturally occuring amino acid
  X_region (545)..(545): Xaa = any naturally occuring amino acid
MDTTIGSVPTASDAAAPAXAAXSAPREATLGRHLARRLAEVGARDVFTVPGDFNLTLLDELEAEAGAGHGGVRLVGCCNELNAAYAADGYARARGGGVGACAVTFTVGGLSAINAVAGAFSENLPVVCIVGGPNSNDYGSNRILHHTIGLPDFTQELRCFQTVTCYQQAVVNNLEDAHEQIDAAISTAIKESKPVYISISCNLPSIPHPTFSRHPVPFFLSPXRLSNQMNLEAAVETAAAFLNKAVKPVLVGGPKMRVAKACKSFVELADACGYPVAVMPSAKGLVPEHHPRFIGTYWGAVSTPFCAEIVESADAYLFAGPIFNDYSSVGYSLLLKKEKAIIVQPDRVVIGHGPAFGCVLMKDFLHALSARLKKNTAAYENYRRIYVPPGEPPLSEPGEPLRVNVLFQHIQKMLSANSAVIAETGDSWFNCQKLKLPEGCGYEFQMQYGSIGWSVGATLGYAKAAKDKRVIACIGDGSFQQVTAQEVSTMLRWGQKSIIFLINNGGYTIEVEIHDGPYNVIKNWNYTGVVEAFHNGEGKCYTAKXVRTEEELKEAIEEAQGPKKDCLCFIEVIVHKDDTSKELLEWGSRVSAANSRPPNPQ

SEQ ID NO: 225 - DNA, 1023 bp, Oryza sativa
  misc_feature (102)..(102): k = guanine or thymine
  misc_feature (650)..(650): r = adenine or guanine
atgtcgacgccgagagcggcggcgagcctcgccaagaaggcggcgctggtggcgctggccgtcctggccgcggcgctcgcgacggcggcgcgcgccgagcaktgcggcgcgcaggccggcggcgccaggtgcccgaactgcctctgctgcagccgctggggctggtgcggcaccacctccgacttctgcggcgacggctgccagagccagtgcagcggctgcggcccgacgccgacgccgacgccgccgagcccctccgacggcgtgggctccatcgtgcccagggacctgttcgagcggctcctcctccaccgcaacgacggggcgtgccccgcgcgcgggttctacacctacgaggccttcctcgccgccgccgccgcgttcccggcgttcggcggcaccggcaacaccgagacgcggaagcgggaggtcgccgcgttcctgggccagacctcccacgagaccaccggcgggtggccgaccgcgcccgacggccccttctcctggggctactgcttcaagcaggagcagaacccgccgtccgactactgccagccctcgccggagtggccgtgcgcccccggccgcaagtactacggccgcggccccatccaactctccttcaacttcaactacgggccggcggggarggcgatcggggtggacctgctgagcaacccggacctggtggcgacggacgcgacggtgtcgttcaagacggcgctgtggttctggatgacgccgcaggggaacaagccgtcgagccacgacgtgatcacggggcggtgggcgccctcgccggccgacgccgcggcggggcgggcgccggggtacggcgtgatcaccaacatcgtcaacggcgggctggagtgcgggcacggccccgacgaccgcgtggcgaaccggatcggcttctaccagcgctactgtggcgcgttcggcatcggcaccggcggcaacctcgactgctacaaccagaggccgttcaacagcggctcgtcggttgggttggcggagcagtga

SEQ ID NO: 226 - protein, 340 aa, Oryza sativa
MSTPRAAASLAKKAALVALAVLAAALATAARAEHCGAQAGGARCPNCLCCSRWGWCGTTSDFCGDGCQSQCSGCGPTPTPTPPSPSDGVGSIVPRDLFERLLLHRNDGACPARGFYTYEAFLAAAAAFPAFGGTGNTETRKREVAAFLGQTSHETTGGWPTAPDGPFSWGYCFKQEQNPPSDYCQPSPEWPCAPGRKYYGRGPIQLSFNFNYGPAGRAIGVDLLSNPDLVATDATVSFKTALWFWMTPQGNKPSSHDVITGRWAPSPADAAAGRAPGYGVITNIVNGGLECGHGPDDRVANRIGFYQRYCGAFGIGTGGNLDCYNQRPFNSGSSVGLAEQ

SEQ ID NO: 227 - DNA, 1536 bp, Oryza sativa
  misc_feature (95)..(95): y = cytosine or thymine
  misc_feature (1381)..(1381): k = guanine or thymine
atggaccggcttcagatatctctgaatccaacggcggcgccgctccaccgcgccagctcgccgacgaggcccacctttctcgccgccatccccaytccggcgcggccctcaaccctccgcgccgcgccgccgccggccacccagcccaccctggaccgcgtcctctccgacctcgggtcccacccgcgcctcctcacccccgacctcctcgactccctcctcgccgccctcccgctccacccctccccgcgccgcaacctcgcccgcctccgccgcctcctctccgtctccctcctccgccgctaccccgcgctcgcccgccgcctcctccacctccacgcctctctgggcctcgtctcctacgcccaccacctgttcgaccacctgctgcccgcgcgcgcccgggaggacgccttcccgtggaactgcctcatcgccgggtacgcgcgcctcggccgccacgaggacgcgctcgcgctctacctccagatggaggaggagaccgtcccgcgggaccgcttcaccttcacgagcgcgctccaggcctgcgccggcgtcggctcggtcgagctcggccatgccatccaccgtgacgtcgtgcgcgccggtctcgcgtccgacgtgcctgtgtgcgacgccctcgtggatttgtacgccacattcggcgacgtacggagggctctccaggtgttcgatgcaatgccggacagggacggcgtctcatggaacatcatgcttgctgggtgcctgcgacatgggctctcccagcaggctctggagctctggagaagaatgctgagagaagaacatgagcccgactccattacattatcaacaatgctgtcgatactgccgttggtttgtgacaatggtaaatggggactggagattcatgcctgggcaattcgtcatggtctcgagacagagctgtcagtagcaaatgctctgatcaggatgtactctgataagaacgaacagagccatgccctgttggtgtttgagtcaatgacgatgagggatctgcagtcctggaatgctataatctctgctcacctccaggactacagaattctcatgatcttccgtcgaatggtggattccgggatgcgaccagatgagaccacctttgcgttggtgttctcagcttgtgacaatttagggctggtggagggtggcatgagattgttctctgagatggagaatgagtacagaattccccctactatggaacaatatacctgcatggtgaacatgctaggcaaggctgggatgatccatgaggcttacgagttcatgtcgaagcggaagcctctcgacaatgaacagactgttttgagggctctactgcaggcttgcttgatgcatcgcaacgccagggttkgagagatcattgcgaagaggttgatcgaactggagcctgacaatgagcacaattttgtaaagttgatggagatctatcaaaatgtgggaaggttgatagaggctgaaaaggtgaagaagacgatgagggatagaggactgtcatgtcaaagctga

SEQ ID NO: 228 - protein, 511 aa, Oryza sativa
MDRLQISLNPTAAPLHRASSPTRPTFLAAIPSPARPSTLRAAPPPATQPTLDRVLSDLGSHPRLLTPDLLDSLLAALPLHPSPRRNLARLRRLLSVSLLRRYPALARRLLHLHASLGLVSYAHHLFDHLLPARAREDAFPWNCLIAGYARLGRHEDALALYLQMEEETVPRDRFTFTSALQACAGVGSVELGHAIHRDVVRAGLASDVPVCDALVDLYATFGDVRRALQVFDAMPDRDGVSWNIMLAGCLRHGLSQQALELWRRMLREEHEPDSITLSTMLSILPLVCDNGKWGLEIHAWAIRHGLETELSVANALIRMYSDKNEQSHALLVFESMTMRDLQSWNAIISAHLQDYRILMIFRRMVDSGMRPDETTFALVFSACDNLGLVEGGMRLFSEMENEYRIPPTMEQYTCMVNMLGKAGMIHEAYEFMSKRKPLDNEQTVLRALLQACLMHRNARVGEIIAKRLIELEPDNEHNFVKLMEIYQNVGRLIEAEKVKKTMRDRGLSCQS

SEQ ID NO: 229 - DNA, 777 bp, Oryza sativa
  misc_feature (195)..(195): y = cytosine or thymine
  misc_feature (206)..(206): m = adenine or cytosine
  misc_feature (233)..(233): m = adenine or cytosine
atggagccctccatctcgcgtcgacgacgtatcgacatcgctctcgtgtcgctgctgctgctcgccgccgccgccgccgccgtcgacgcggcgaccatcaccatggtgaaccgctgctcgtacacggtgtggccgggcgcgctcccgggcggcggcgcccggctcgacccggggcagtcgtggtcgatcagcgtygccgccggcamaccggccgccaggatctggccgcgcamcggctgctccttcgacggcgccggccgcggccgctgcgccacgggcgactgcgccggcgcgctgtcctgcgccgtctccggcgagccgcccaccacgctggccgagtacacgctcggccgccccggcgccggcggcgacgacttcctcgacctgtcgctcatcgacgggttcaacgtgccggtgagcttccagccggcgaacggcggtggcgcccggtgcagcaaggggcgcgggccgagctgcgccgtggacatcacggcgaggtgcctccccgagctccgtgtccccggcggctgcgccagcgcgtgcggcaagttcggcggcgacacctactgctgccggggacggttcgagcacgtgtgcccgccgacgagctactccatgttcttcaaggggctctgccccgacgcctacagctacgccaaggacgaccagaccagcaccttcacctgccccgctggcaccaactaccgcgtcgacttctgcccgccgacgagcggcgtgacggccggtgacgaggacgacgagatcgcctctgcttaa

SEQ ID NO: 230 - protein, 258 aa, Oryza sativa
MEPSISRRRRIDIALVSLLLLAAAAAAVDAATITMVNRCSYTVWPGALPGGGARLDPGQSWSISVAAGRPAARIWPRSGCSFDGAGRGRCATGDCAGALSCAVSGEPPTTLAEYTLGRPGAGGDDFLDLSLIDGFNVPVSFQPANGGGARCSKGRGPSCAVDITARCLPELRVPGGCASACGKFGGDTYCCRGRFEHVCPPTSYSMFFKGLCPDAYSYAKDDQTSTFTCPAGTNYRVDFCPPTSGVTAGDEDDEIASA

SEQ ID NO: 231 - DNA, 719 bp, Oryza sativa
atggcgacgacgacggcgaggttgctcctcctgctcacggtggcgggcttctgcctctgccacaccacctgccaggaggcggcgccgccgccgccgccgtactgcggcagcctgaggacggccgtggaggcgcggaacatcatcgggtggaagacggtgccgccgccgtgcgccaagtacgtcgccgactacatcaccggcgagcggtacggccgcgacgccgacgtggtgatcaacgaggccatcgcctacgccgagagcctcaagctctccggcaccggcaaggagatctgggtgttcgacgtcgacgacaccgccctctccaccgtgccctaccaagccaaccatggctacggagcttcctcaagtacgtggtgcagggaagcgcgccagcactgcagagtacactgcggctttaccgacggttactccagcttggtataaagccggtgttcctgacagaccgcaccgaggaccagaggacggtcacaaccaacaaccttattaagcagggctactgcaattgggagaagcttgtgctgcagccggttaggcttcagacctcgacgttggcgttcaagacctgcgaacgacagaagctggtgaatgatggctacatcatcgtcggcaacattggcgaccagtggaacgacatccgccgctcgccggatggttgccgcacctttaagttccccaaccccatgtactatgtcgactag

SEQ ID NO: 232 - protein, 238 aa, Oryza sativa
MATTTARLLLLLTVAGFCLCHTTCQEAAPPPPPYCGSLRTAVEARNIIGWKTVPPPCAKYVADYITGERYGRDADVVINEAIAYAESLKLSGTGKEIWVFDVDDTALSTVPYQANHGYGFLKYVVQGSAPALQSTLRLYRRLLQLGIKPVFLTDRTEDQRTVTTNNLIKQGYCNWEKLVLQPVRLQTSTLAFKTCERQKLVNDGYIIVGNIGDQWNDIRRSPDGCRTFKFPNPMYYVD

SEQ ID NO: 233 - DNA, 1539 bp, Oryza sativa
atggtggactcgctgctatacgggctcctagacctgcgcatggcggcgccattgcttgcagctgccgtggcgttgtacgtccttgtcgagcagctgtcctaccaccgcaagaaagggtccctgccagggccgccgctcgtcgtgccgttcatcggcagcgccacgcacatgatccgcgacccgaccgggttctgggaaatgcaggctgctcgcgctagaaagtccggcgttgggttcaccgccgacttcctggccggcaagttcacgatcttcatccgcgactcggagttgtccaaccgcgtcttcgcgaacgtccgccccgacgccttcttcgtcatcggccacccgttcggcaagaagctcttcggcgaccacaacctcatctacctgttcggcgacgaccacaaggacctgcgccgccgtatggcgaccaacttcacgccgcgcgcgctctccacctacgccgccatccagcagcgcggcatcgtctcccacctccggcggtggctcgaccggagcgccgccaacggcggcaaggccgagccgatacgggtgccctgccgcgacatgaacctcgagacctcgcagacggtgttcgcggggccgtacctcaccgaggaggcgagggagaggttcaagagcgactacaatctcttcaatgtaggcctcttggccttccccgttgacctgccggggctcgcgttccggcgtgcgaggcaagccgtggcgaggctggtgcgcatgctccgcgattgcgcgagggagagcaaggcgcggatgcgcgccggcggtgagccagagtgcctcgtggactactggatgcaggagacggtgcgggagatcgacgaggccaaggcggcggggctgccgccgccggcgcacatctccgacgacgaggagatcgggggcttcctcttcgacttcctcttcgcggcgcaggacgcgtccacctcctccctctgctgggccgtgtccgcgctggactcccacccggacgtgctcgcccgcgtgcgcgccgaggtggcctccctctggtcccccgactccggcgagcccatcaccgccgataagatcgccgaaatgaagtacacaaaggctgttgctcgcgaggtggtccggcaccgcccaccggcgacgctgatgccacacatcgccttgcagaacttccagctgacggaatcgtacacgatccctaagggcaccctggtgctcccgtcgatgtacgagtcgtcgtttcaggggttccatgaccccgacgcgttcgacccggagcgcttcttctcggaggcgcggagggaggacgtggtgtacaagcgcaacttcctcgcgttcggcgccggcccgcaccagtgcgtcggtcagcggtacgcgctcaaccacctcgtcatcttcatggcgctcttcgtctccctcgtcgacttccggcgtgagaggacggagggctgcgacgttgccgggtgtacatgccgaccatggtgccgagggacggctgcgtcgtctacctcaagcagcgctgagtcaagtttgccgtcgttctga

SEQ ID NO: 234 - protein, 512 aa, Oryza sativa
MVDSLLYGLLDLRMAAPLLAAAVALYVLVEQLSYHRKKGSLPGPPLVVPFIGSATHMIRDPTGFWEMQAARARKSGVGFTADFLAGKFTIFIRDSELSNRVFANVRPDAFFVIGHPFGKKLFGDHNLIYLFGDDHKDLRRRMATNFTPRALSTYAAIQQRGIVSHLRRWLDRSAANGGKAEPIRVPCRDMNLETSQTVFAGPYLTEEARERFKSDYNLFNVGLLAFPVDLPGLAFRRARQAVARLVRMLRDCARESKARMRAGGEPECLVDYWMQETVREIDEAKAAGLPPPAHISDDEEIGGFLFDFLFAAQDASTSSLCWAVSALDSHPDVLARVRAEVASLWSPDSGEPITADKIAEMKYTKAVAREVVRHRPPATLMPHIALQNFQLTESYTIPKGTLVLPSMYESSFQGFHDPDAFDPERFFSEARREDVVYKRNFLAFGAGPHQCVGQRYALNHLVIFMALFVSLVDFRRERTEGCDVAGCTCRPWCRGTAASSTSSSAESSLPSF

SEQ ID NO: 235 - DNA, 676 bp, Oryza sativa
atggctgctgttggcgcctgcttcctccagcagcttgctgtcgttgccctcttggctctgtggtgctctcatggcgccatcgcctccgatcctggccttcttcaggacttctgcgtcgtcgacaagatgtctcaaggcagtgcgtgtaaatgggttcccttgcaaggacgccaaggacgttgtcgccggcgacttcttcttctccggcctccacatggccggcaacaccaccaacaagcagggatccaacgttaccaccgtcaacgttgcacagatcccgggtctgaacaccatgggcgtctccctcgtccgcatcgactatgcgcccaacggcctcaacccgcctcacactcatccacgtgccaccgagatcccgaccgttctcgaaggatctctctatgtcggcttcgtgatatcgaaccccgagaataagttgttcaccaaggttcttaacaagggtgatgtgtttgtgtttccacaaggattagtccattttcagtttaacaatggaacaaacaatgctgtggctcttgctgctctgagcagccagaacccaggggtgataaccgtgggaaatgctgtttttggatcaaagccatctatctcggatgatatccttgccaaagccttccaagtggacaagaacatcatagaccgaatccaagctcaattctag

SEQ ID NO: 236 - protein, 213 aa, Oryza sativa
  X_region (141)..(143): Xaa = any naturally occuring amino acid
MAAVGACFLQQLAVVALLALWCSHGAIASDPGLLQDFCVSTRCLKAVRVNGFPCKDAKDVVAGDFFFSGLHMAGNTTNKQGSNVTTVNVAQIPGLNTMGVSLVRIDYAPNGLNPPHTHPRATEIPTVLEGSLYVGFVISNXXXPENKLFTKVLNKGDVFVFPQGLVHFQFNNGTNNAVALAALSSQNPGVITVGNAVFGQSHLSRMISLPKPS

SEQ ID NO: 237 - DNA, 1146 bp, Oryza sativa
atgctgccacgcgcggtggcgccggccggccgtcttcgtcgcttccgcgtgtcgtcacactccactccgtccaccaccaccaccaccgcatcgatggacgatggacgcaccacttctatatataatgaccaatcgtcgaccatgtccgcactcgcgcatatcacagtcacagctgcagccatggcgaagcccactcctgctcctcgcgccacaccattcctcctcgccgccgtgctctccatcgtcgtcgtcgcggcctccggcgcggaggcgcggtggtacggcggcggcggcggcggcgggtacagccccagccccagcccggtgtcgtcgatcgtcagcgagcagctgtacgcctccctgttcctgcacaaggacgacgcggcctgcccggcgagggggttctacacctacgcgtccttcgtcagggccgcgacgaggttcccccggttcgccgccacgggctgcgccgacgcccgcaagcgcgaggtcgccgccttcctcgcgcagatctcccacgagaccaccggcggctgggccaccgcgcccgacggcccctaacgcctggggcctctgctacaaggaggagatcaacccgcagagcagctactgcgacgccaccgacaagcagtggccgtgctaccccggcaagtcctaccatggccgaggccccatccaaatctcatgtctagtcaccaacgtaatgtatgcatgatgatgagcaggaacttcaactacgggccggcgggccaggccctgggcttcgatggtctgcgcaacccggagatcgtggccaactgctcggacatagcgttccagacggcgctgtggttctggatgacgccgagggacaccaagccgtcgtgccaccaggtgatggtcggggagtaccggcccggcccggccgacgtggcggctaaccgcacggcgggcttcgggctggtcaccaacatcgtcaacggcgggctcgagtgcaaccgggcaggcgacgcccgggtgaacaaccgcatcggcttctaccggcgctactgccaggtgctcggcgtcgacgtcgggcccaacctcgactgcgagcaccagcagcccttctagcttgctataaaaattcatgtcgtttctcatgtcgctgcttgcgattagctgtaa

SEQ ID NO: 238 - protein, 363 aa, Oryza sativa
  X_region (209)..(209): Xaa = any naturally occuring amino acid
  X_region (238)..(240): Xaa = any naturally occuring amino acid
MLPRAVAPAGRLRRFRVSSHSTPSTTTTTASMDDGRTTSIYNDQSSTMSALAHITVTAAAMAKPTPAPRATPFLLAAVLSIVVVAASGAEARWYGGGGGGGYSPSPSPVSSIVSEQLYASLFLHKDDAACPARGFYTYASFVRAATRFPRFAATGCADARKREVAAFLAQISHETTGGWATAPDGPNAWGLCYKEEINPQSSYCTPPTXQWPCYPGKSYHGRGPIQISCLVTNVMYAXXXSRNFNYGPAGQALGFDGLRNPEIVANCSDIAFQTALWFWMTPRDTKPSCHQVMVGEYRPGPADVAANRTAGFGLVTNIVNGGLECNRAGDARVNNRIGFYRRYCQVLGVDVGPNLDCEHQQPF

SEQ ID NO: 239 - DNA, 1806 bp, Oryza sativa
  misc_feature (313)..(313): k = guanine or thymine
  misc_feature (514)..(514): k = guanine or thymine
  misc_feature (1200)..(1200): k = guanine or thymine
atgccacctccaagaaccaagcaccggccgcttctcctcgccaccaccttcctctcccttctgctgctgctgctgctgctcagcttgctctccaccgcgcacaaggcattcgccgtcgctgacgacgacggccaccgcgcgcgcgtgcttcttgcagcagacggcggcaaaaggaattcccgattcccgagcacagcggccgccgtggaccggcattgcgccgggacgctccaccgggacgtctgcgtgtcgacgctgtccaccatcccgaacctcgcgcggaagccgctccgggacgtgatctccgaggtcktggggcgcgccgcgtcggcggtgcgcgcgtcgtcgtccaactgcacgtcctacctccagcggccgcggcagctgcgcacgcgcgaccgcctcgcgctgtccgactgcctcgagctgttcgggcacacgctggacctgctgggcacggcggccgcggagctctccgccgggaacagcaccgccgaggagtccgccgccggcktgcagaccgtgctgtcggcggcgatgacgaaccagtacacctgcctcgacgggttcgccgggccgtccgcctcggaggacgggcgcgtccggccgttcatccagggccgcatctaccacgtcgcccacctggtctccaactcgctcgccatggtgcggcgcctcccgacccagcggcggcgcggggcggaggaggagccattggaagggtacggccgcgtgcgacgcgggttcccgtcgtgggtgtcggcgtcggaccggaggcggctgcagcagcaggtggcggcggacgtggtggtggcgaaggacgggagcgggaagttcacgacggtgagcgaggcggtggcggcggcgccgaacaacagcgagacgcggtacgtgatatacatcaaggccggcgggtacttcgagaacgtggaggtcgggagcgagaagaccaacatcatgttcgtcggcgacggcacgtggaagaccgtcatcaaggccagccgcaacgtcgtcgacaactccaccaccttccgctctgccacgctcggtaaccaatccttttgctcaattcgtgaaccaattttccaaacctttttttgcatgcacaccgccgtggtgggcacggggtttctggcgcgggacataacggtggagaacgcggcggggccgagcaagcaccaggcggttgcgctgcgggtkaacgccgacctgtcggcgttctaccggtgcagcttcgcgggctaccaggacacgctgtacgcgcactcgcttcgccagttctaccgcgactgcgacatctacggcacggtggacttcatcttcggcgacgccgccgtcgtgctccagaactgcaacctctacgcgcgccgcccggaccccaaccagaagaatgtgttcacggcgcagggccgggaggaccccaaccagaacaccggcatcgccatccagggctgcaaggtcgccgccgccgccgacctcgtccccgtccaggccaacttctcctcctacctcggccgcccgtggaagacctactcgcgcacggtgttcctgcagtccaagatcgacagcctgatacaccccagggggtggctcgagtggaacggcagcttcgcgctcgacacgctctactacgccgagtacatgaaccgcggcgacggcgccgacacgtcggcgagggtgtcgtggccggggtaccacgtgctcaccaacgccaccgacgcggccaacttcaccgtgctcaacttcgtgcagggtgacctctggctcaactccagctcgttcccctacatcttggggttgagctga

SEQ ID NO: 240 - protein, 601 aa, Oryza sativa
MPPPRTKHRPLLLATTFLSLLLLLLLLSLLSTAHKAFAVADDDGHRARVLLAADGGKRNSRFPSTAAAVDRHCAGTLHRDVCVSTLSTIPNLARKPLRDVISEVLGRAASAVRASSSNCTSYLQRPRQLRTRDRLALSDCLELFGHTLDLLGTAAAELSAGNSTAEESAAGLQTVLSAAMTNQYTCLDGFAGPSASEDGRVRPFIQGRIYHVAHLVSNSLAMVRRLPTQRRRGAEEEPLEGYGRVRRGFPSWVSASDRRRLQQQVAADVVVAKDGSGKFTTVSEAVAAAPNNSETRYVIYIKAGGYFENVEVGSEKTNIMFVGDGTWKTVIKASRNVVDNSTTFRSATLGNQSFCSIREPIFQTFFCMHTAVVGTGFLARDITVENAAGPSKHQAVALRVNADLSAFYRCSFAGYQDTLYAHSLRQFYRDCDIYGTVDFIFGDAAVVLQNCNLYARRPDPNQKNVFTAQGREDPNQNTGIAIQGCKVAAAADLVPVQANFSSYLGRPWKTYSRTVFLQSKIDSLIHPRGWLEWNGSFALDTLYYAEYMNRGDGADTSARVSWPGYHVLTNATDAANFTVLNFVQGDLWLNSSSFPYILGLS

SEQ ID NO: 241 - DNA, 1524 bp, Oryza sativa
atgctcagcttctcgtcctccgcctcgtcgtgctcctccggcggcggtggcgccgccgtggccgctgcggcggcggctggcggggcgatgccgctgtactatggcacgcctgcttcttgctcaggattgagctcagtgagcttgagcagcagcatgcagggtgcaatggccagggtgaggggtcccttcacgccgtctcagtggatcgagctggagcaccaggcgctgatatacaagtacttggctgcgaatagccctgtaccacacagcctcctcatccccatcaggaggagcctcacatcgccctactcacctgcctactttggctcaagcacattgggatggggatctttccagctgggctactccggcagcgcggatccggagcccggccggtgccgccggacggacggcaagaaatggcggtgctcgagggatgcggtcgccgaccagaagtactgtgagcgacacatgaaccggggacgccaccgttcaagaaagcatgtggaaggccagcctggccatgccgcgaaagcgatgcccgcggcggtggcagcagccgctgcctctgctacccagcctagtgctccggccgcccacagtggcggagctgttgctggcctcgctatcaaccatcagcaccagcaaatgaagaactacgctgccaacactgccaatccttgctctctgcaatatagcagggatctggcaaacaagcataatgagagtgaacaagtgcaagactcagacagtctctcgatgctgacttccattagcacgagaaatacgggcagcctgtttccgttctcaaaacaacataatccttttgaagtgtccaactcaaggccagattttggcctagtatcacctgattcactgatgagttctcctcatagctccttggagaacgtcaatttgctcacttcgcagagtctgaatgaacaacagagttcagtttcccttcaacactttgtggactggccaaggacacctgcacaaggagctctcgcatggcctgatgctgaagacatgcaagctcagagaagccagctctcaatatctgctccaatggcgtcttctgacctgtcatcagcctcaacatctcccatccatgagaagctgatgttgtcaccacttaaactgagccgtgaatatagtcctattggtctcggttttgcagcaaatagagatgaggttaaccagggagaagcaaactggatgcctatgttccgtgattctttgatgggcggaccattgggagaggttttaaccaagaataacaacatggaagcaaggaattgcctatcggagtctctgaatcttttaaatgatggctgggattcaagctcagggtttgattcatccccagttggtgttctgcagaagaccacctttggatcagtatccagtagcaccggaagcagtcctagactggagaatcatagtgtttatgatggcaacagtaacctgcgggatgatctcggttcagttgttgtaaatcatccgagcatccgcctggtgtga

SEQ ID NO: 242 - protein, 507 aa, Oryza sativa
MLSFSSSASSCSSGGGGAAVAAAAAAGGAMPLYYGTPASCSGLSSVSLSSSMQGAMARVRGPFTPSQWIELEHQALIYKYLAANSPVPHSLLIPIRRSLTSPYSPAYFGSSTLGWGSFQLGYSGSADPEPGRCRRTDGKKWRCSRDAVADQKYCERHMNRGRHRSRKHVEGQPGHAAKAMPAAVAAAAASATQPSAPAAHSGGAVAGLAINHQHQQMKNYAANTANPCSLQYSRDLANKHNESEQVQDSDSLSMLTSISTRNTGSLFPFSKQHNPFEVSNSRPDFGLVSPDSLMSSPHSSLENVNLLTSQSLNEQQSSVSLQHFVDWPRTPAQGALAWPDAEDMQAQRSQLSISAPMASSDLSSASTSPIHEKLMLSPLKLSREYSPIGLGFAANRDEVNQGEANWMPMFRDSLMGGPLGEVLTKNNNMEARNCLSESLNLLNDGWDSSSGFDSSPVGVLQKTTFGSVSSSTGSSPRLENHSVYDGNSNLRDDLGSVVVNHPSIRLV

SEQ ID NO: 243 - DNA, 4158 bp, Oryza sativa
  misc_feature (8)..(8): m = adenine or cytosine
  misc_feature (11)..(11): m = adenine or cytosine
  misc_feature (514)..(514): w = adenine or thymine
  misc_feature (521)..(521): s = guanine or cytosine
  misc_feature (691)..(691): r = adenine or guanine
  misc_feature (1625)..(1625): m = adenine or cytosine
atgagggmaamcctggtggggcagtggaccgtccttgctcgctactactctttgaagacgccaaatcagaatgctctctttgatgacatgcgtcgagcgtggagattgagggctgacatgaattacaagtctcttagggacaacctgttcattgtttccttcagctctgaaggggattataagtttgttaaggatggaggtccttggttacatcgaggtgatgctcttttggtggcagagtttgatggcctgacaagcccatcgcaagtcccactggaggtggttccaatttgggttagaatctatgatctcccgttggttttgatgacgaaggataggggaatcttatatggcagcaagctgggacatgttcgggaggtggatgtggaagcagatgggcggaacaagcatgatttctttcgtattcgagttgatctccccgttaatcgtgctttaaaaacacacatagctatcaagatcaatgtccaaggcaatgaggagtggagcgggcagwgtgctasctccacttcatcgagacataagaaggttgagcaatgggatgaggcagttcctccaaggatggaggcttttgatggttttgaattaaatgagaaggaaggggatgctaatgttgacctgcagcttgccgatcagacccgcaatatgcaggtgtcagggggtggttctcagratgccgaaggcctcacaaaaggaaggaaaactaaacaagctagaccggcaccttcaggaagagcactgaagcgtgtcaggaaggaggcaacgggggatacacagatggaggatatggaagcaaccagctcgggggctgctggagcaatgaattgcttatcgtggaactgccgtggcatcgggaacgccacgacagttcaagagctttgtgccttggtcaaagaggccagttcccaatttgtatttttatgtgaaactaggcagccagtggataagattaagcgtttgcgtaatagattgggtttgagaggttttgcaggggttagcagtgatggaatgagtggtgggcttgctcttttctggcatgagtctgttcatgtggaaatcttaaataagaatgaaaggtttattgatgcttatattcgtctgtctcctaatgatcctttgtggcatgctacctttgtttatggggaacccagagtagagaatagacacaagatgtggtcgttgctcaactcaatcaaacaatcttcaaacttgtcgtggctagttataggggattttaatgaagctttgtggcagtttgaacatttctccaggaaacctagaagtgatgctcaaatgcaggcctttagggacgtgttggacacatgtgagcttcatgatttgggaatttctgggttaccacacacgtatgataatagaaggggcggctggaacaatgtaaaggttcgcttggatcgtgctttggcagatgacgagtggagggatttgttcagtcagtaccaagtccaacatttggtttctccctgttctaaccattgtcctattgttcttaaattacatggttctgtcccagatcagaatattggcagagaattggagaaaacaaggaagaaactctcaaaccttttagaagctggaactgataaagmtgctatacggcaaacctcggattacatgaatgaattgttgtatcgggaagagatgttgtggcttcaacgatcccgcgttaactggctgaaagaaggagatcgtaatacaaaattctttcacaatagagtggcctggagagccaagaagaacaaaattaccaagctgcgagatgctgctggtacttttcataggtcgaaaatggtgatggaacaaatggcaacacagtattttaaagatatgtttactgctgacccaaacttggatcattccccggtgactagattaattcaaccaaaagttacggaagaaatgaacaacagattatgctctgaattctcagaagatgaaatagcaaatgccttgtttcagatagggcctttaaaggcaccgggtactgacggctttctggccagattctaccaacgtaattggggctgcatcaaaaatgatatcgtgagagcagtaaaagaattcttccattctgggattatgctggaaggggtgaatgatactgccatcgttcttattccaaaaattgaacaacctagagacttgcgagacttcaggccaattagcttatgtaatgtgatctacaaggttctgtccaagtgtctggttaataggctgaggccttttttggatgaattgatctctaaaaatcagagtgcttttgttcctaggagaatgatcaccgataatgcacttcttgcttttgaatgctttcatttcattcagagaaataagaatccgagatcggctgcctgcgcgtataagcttgatctctccaaggcttatgatcgcgtcgactggaggtttttggagcaatcaatgtataagtggggtttttctcattgttgggtctgcgacaaggggacccgttgtgacccctttctctttctgtttgtggccgatggtttatccttgctacttgaagagaaggtggaacagggagctatctccccaatccgggtttgccaccaagcaccagggatctctcatctactgtttgcagatgacacactgttattcttcaaggctgatctttcacagtcacaagctatcaaggaggtgttcggcagttatgctactagtacaggtcagctaatcaatccaacaaagtgctctatcttgtttggtaactccttgccgatagcttctcgagatgccatcacaaactgcttgcaaattgcaagcacggagtttgaagataaataccttggtctccccactccgggaggacgaatgcacaaaggtaggtttcagagcttgcgagaaagaatatggaaaaagattctacaatggggtgagaattacctatcgagcggcggaaaggaagttcttatcaaggctgtcatccaagcaattcctgtctatgttatggggatttttaaattgccggagtcggtttgcgaggacctaacaagcttgacccggaatttttggtggggagctgaaaaggggaagcggaaaactcactggaaggcatggaaatctctcaccaaatccaagtctttgggtggcctaggtttcaaagatatccgtctgtttaaccaggccttattagcaaggcaagcgtggagactcatcgataaccctgatagcttgtgtgcacgggttttgaaagcaaaatattatccaaatggatcaattgttgacactagttttggagggaatgcctccccggggtggcaggccattgaacatggcttagagttggtgaaaaagggcatcatctggaggattggtaatggcagatcggtgcgcgtgtggcaggatccttggctgccaagagatctgtcaagaagacctatcacaccgaagaataattgtagaattaaatgggtggctgacctcatgttagacaatgggatgtgggatgctaataagattaaccaaatcttcctgcctgttgatgttgagatcattctaaagctgcgcacctcatctcgtgatgaagaagattttattgcctggcatccggataaactcgggaatttttcagttcgcacagcttataggctggcagagaattgggctaaagaggaagcaagctcgagttcctctgatgtcaacatcaggaaagcttgggaattgttatggaaatgtaatgttccatccaaagttaaaatcttcacttggagagcaacctctaactgccttcctacttgggacaacaagaagaaacggaacctggagatttctgatacgtgcgtcatctgtggcatggagaaggaagatacaatgcatgccctatgccgctgtccgcaagctaaacacctctggttagccatgaaggaatcaaatgatctgtcactaaggatggatgatcacttattaggcccatcctggcttttcaatcggctggccttgttgccggatcatgaacagcccatgtttcttatggttctgtggcgaatttggttcgtccataatgagatcatacatgggaaaccgagcccttcgatagaggcttcacaacggttcttacagagctatatgaaatcacttttagagattaagcaacatccttaa

SEQ ID NO: 244 - protein, 1385 aa, Oryza sativa
MRGSLVGQWTVLARYYSLKTPNQNALFDDMRRAWRLRADMNYKSLRDNLFIVSFSSEGDYKFVKDGGPWLHRGDALLVAEFDGLTSPSQVPLEVVPIWVRIYDLPLVLMTKDRGILYGSKLGHVREVDVEADGRNKHDFFRIRVDLPVNRALKTHIAIKINVQGNEEWSGQGASSTSSRHKKVEQWDEAVPPRMEAFDGFELNEKEGDANVDLQLADQTRNMQVSGGGSQDAEGLTKGRKTKQARPAPSGRALKRVRKEATGDTQMEDMEATSSGAAGAMNCLSWNCRGIGNATTVQELCALVKEASSQFVFLCETRQPVDKIKRLRNRLGLRGFAGVSSDGMSGGLALFWHESVHVEILNKNERFIDAYIRLSPNDPLWHATFVYGEPRVENRHKMWSLLNSIKQSSNLSWLVIGDFNEALWQFEHFSRKPRSDAQMQAFRDVLDTCELHDLGISGLPHTYDNRRGGWNNVKVRLDRALADDEWRDLFSQYQVQHLVSPCSNHCPIVLKLHGSVPDQNIGRELEKTRKKLSNLLEAGTDKGAIRQTSDYMNELLYREEMLWLQRSRVNWLKEGDRNTKFFHNRVAWRAKKNKITKLRDAAGTFHRSKMVMEQMATQYFKDMFTADPNLDHSPVTRLIQPKVTEEMNNRLCSEFSEDEIANALFQIGPLKAPGTDGFLARFYQRNWGCIKNDIVRAVKEFFHSGIMLEGVNDTAIVLIPKIEQPRDLRDFRPISLCNVIYKVLSKCLVNRLRPFLDELISKNQSAFVPRRMITDNALLAFECFHFIQRNKNPRSAACAYKLDLSKAYDRVDWRFLEQSMYKWGFSHCWVCDKGTRCDPFLFLFVADGLSLLLEEKVEQGAISPIRVCHQAPGISHLLFADDTLLFFKADLSQSQAIKEVFGSYATSTGQLINPTKCSILFGNSLPIASRDAITNCLQIASTEFEDKYLGLPTPGGRMHKGRFQSLRERIWKKILQWGENYLSSGGKEVLIKAVIQAIPVYVMGIFKLPESVCEDLTSLTRNFWWGAEKGKRKTHWKAWKSLTKSKSLGGLGFKDIRLFNQALLARQAWRLIDNPDSLCARVLKAKYYPNGSIVDTSFGGNASPGWQAIEHGLELVKKGIIWRIGNGRSVRVWQDPWLPRDLSRRPITPKNNCRIKWVADLMLDNGMWDANKINQIFLPVDVEIILKLRTSSRDEEDFIAWHPDKLGNFSVRTAYRLAENWAKEEASSSSSDVNIRKAWELLWKCNVPSKVKIFTWRATSNCLPTWDNKKKRNLEISDTCVICGMEKEDTMHALCRCPQAKHLWLAMKESNDLSLRMDDHLLGPSWLFNRLALLPDHEQPMFLMVLWRIWFVHNEIIHGKPSPSIEASQRFLQSYMKSLLEIKQHP

SEQ ID NO: 245 - DNA, 1089 bp, Oryza sativa
  misc_feature (67)..(67): y = cytosine or thymine
  misc_feature (81)..(81): m = adenine or cytosine
  misc_feature (84)..(84): s = guanine or cytosine
  misc_feature (101)..(101): k = guanine or thymine
  misc_feature (195)..(195): m = adenine or cytosine
  misc_feature (197)..(197): m = adenine or cytosine
  misc_feature (987)..(987): y = cytosine or thymine
atgccggggtcatccggccgcgcgccgctcttcgcgttgccgtggcccccgcggccctgtcggcctyctccatgctcggcmgtsggcgcggcggcgcggcktaccaggccgcgtcgtggcgcacgtggcgccggtgccagctatcaggccgtgcgccagctgggtcgtcgaggccatgcgcgcgtcgtcgccgamamggcccgccgccgccgcgttgaagccgattacgacgcgtggacgcagaggaagcacccgtcggcgctgggcagcttcgagcaggtggccgcggcggcgagcgggaagcgcgtcgtcgtgttcctcgactacgacggcaccctctcccccatcgtcgccgaccccgacatggccttcatgtccgacgagatgagggcggccgtgcgcgacgtggcggagcacttcccggcggcgatcgtgaccgggcgctgcgtcgacaaggtgcagagcttcgtcggcctcccggagctctactacgccggcagccatggcatggacatcaagggccccagctccaacgaggaagaagacaccaagatcctcttgcagccagctcgcgagttcctcccggtgatcaacaaggcttacaaggctttgatggagaagacgaagagcacgcctggggccagagtggagaacaacaagttctgcctctccgtgcacttcagatgcgtcgatgagaagagatggaatccgttggcagagcaagtgaaggccgtgctccgggactaccccgagctcaaactcacccaaggaagaaaggtcctggagatccggccgtcgatcatgtgggacaagggcaaggcggtggagttcttgctgaaatctctcggattcgacgacgaccgccgcgacgtcctgccggtgtacatcggagacgaccggaccgacgaagatgctttcaaggtgttgagaaagagaggtcaagggttgggaattcttgtctccaagtgtgccaaggagactgacgcytcgtactctctcgtaggacccagcacagtcatggagttccttgttcgattggtgcagtggaagcttcggcgatcatcgtcagcgatgcgcccgagggtttaa

SEQ ID NO: 246 - protein, 362 aa, Oryza sativa
MPGSSGRAPLFALPWPPRPCRPPPCSAVGAAARPTRPRRGARGAGASYQAVRQLGRRGHARVVAEKARRRRVEADYDAWTQRKHPSALGSFEQVAAAASGKRVVVFLDYDGTLSPIVADPDMAFMSDEMRAAVRDVAEHFPAAIVTGRCVDKVQSFVGLPELYYAGSHGMDIKGPSSNEEEDTKILLQPAREFLPVINKAYKALMEKTKSTPGARVENNKFCLSVHFRCVDEKRWNPLAEQVKAVLRDYPELKLTQGRKVLEIRPSIMWDKGKAVEFLLKSLGFDDDRRDVLPVYIGDDRTDEDAFKVLRKRGQGLGILVSKCAKETDASYSLVGPSTVMEFLVRLVQWKLRRSSSAMRPRV

SEQ ID NO: 247 - DNA, 1560 bp, Oryza sativa
atggcgggcggcgcgatggtccagacggtgggtggcaagacgtacccggggaagatgaccgcgttcgtgttcttcacctgcctcgtcgcctcctccggcggcctcatcttcggctacgacatcggcatctccggcggcgtcacctccatggactccttcctcagcgagttcttcccgtcggtgtacgcgcaggcgaaggcgagcaaggacaccaaccagtactgcaagttcgacagccagctgctgacgctcttcacctcgtcgctgtacctggcggcgctggcgacgtcgttcgtggcggcgtgggtcacccgggtgttcggccggaagtggtccatgttctgcggcggcgtcaccttcctcgccggctcggcgctcaacggcgccgccaccgacgtcatgatgctcatcctcggccgcatcctcctcggcatcggcgtcggcttcgccaaccagtccgtgccgctctacctgtcggagatggcgccggcgaacctccgcgggatgctcaacatcggcttccagctcatgaccaccatcggcatcctctccgccaacctcatcaactacgcgacgtcgagcatcgagggcgggtgggggtggcgcatcggcctcggcctcgccggcgtgcccgcgctcatcatcacgctcggcgcgctcgtcctcccggacaccccaaactccctcatcgcccgcggctacgccggcgacgccaagcgcgtcctcgtcaagatccgcggcacggacgacgtccacgacgagtacgacgacatggtagcggcaagcgaagaagccgcctcgatcgagcacccatggcggaacatcctccatcgcaagtaccgcccgcagctcaccatcgccatcctcatcccgtgcttccaacagctcaccggcatcaacgtgatcatgttctacgcgccggtgctcttcctcaccatcggcttcgccggcgacgcgtcgctcatgtccgccgtgatcacgggcctcgtcaacatgttcgccaccgtcgtctcgatcatctccgtggaccgcctcggccgccgcgtgctgttcctccagggcggcacgcagatgttcatctcccaggtggtggtcgggacgctgatcgcgctccagttcggcgtcgcgggcgtcggcgagatgtcgcggtcgtacgccatcttgctcgtgctgttcatctgcatgtacgtggccgggttcgcgtggtcgtgggggcccctggggtggctggtgccgagcgaggtgttcgcgctggagatcaggtcggcggggcagagcatcgcggtgtgcgtcaacatgatgctgacgttcgtcatcgggcaggcgttcctcaccatgctgtgccacctcaagttcggcctcttctacttcttcgccgggtggatgctggtcatgaccaccttcgtcgcgctcttcctgccggagacgaagggggtgcccatcgaggagatgaaccacgtctggagccggcactggttctggggcagctacgtcaccgcccacgacgtcgccggcgccggcgccggaggaggaggaaaccgcagaagccacaacgtctag

SEQ ID NO: 248 - protein, 519 aa, Oryza sativa
MAGGAMVQTVGGKTYPGKMTAFVFFTCLVASSGGLIFGYDIGISGGVTSMDSFLSEFFPSVYAQAKASKDTNQYCKFDSQLLTLFTSSLYLAALATSFVAAWVTRVFGRKWSMFCGGVTFLAGSALNGAATDVMMLILGRILLGIGVGFANQSVPLYLSEMAPANLRGMLNIGFQLMTTIGILSANLINYATSSIEGGWGWRIGLGLAGVPALIITLGALVLPDTPNSLIARGYAGDAKRVLVKIRGTDDVHDEYDDMVAASEEAASIEHPWRNILHRKYRPQLTIAILIPCFQQLTGINVIMFYAPVLFLTIGFAGDASLMSAVITGLVNMFATVVSIISVDRLGRRVLFLQGGTQMFISQVVVGTLIALQFGVAGVGEMSRSYAILLVLFICMYVAGFAWSWGPLGWLVPSEVFALEIRSAGQSIAVCVNMMLTFVIGQAFLTMLCHLKFGLFYFFAGWMLVMTTFVALFLPETKGVPIEEMNHVWSRHWFWGSYVTAHDVAGAGAGGGGNRRSHNV

SEQ ID NO: 249 - DNA, 2907 bp, Oryza sativa
  misc_feature (35)..(35): s = guanine or cytosine
  misc_feature (52)..(52): s = guanine or cytosine
  misc_feature (97)..(97): s = guanine or cytosine
  misc_feature (108)..(108): r = adenine or guanine
  misc_feature (114)..(114): s = guanine or cytosine
  misc_feature (130)..(130): s = guanine or cytosine
atggagatagcttccgcggccgcccaccaaatctsgcccatggtttcctccsgcgaccccggcgaggaaggccagcgcgccgcggcccccggccccsgggccgcggcraaaaascggcgaatgcgcggcsgcaccccgtcgccggagccggcctccgcgccgcagacaaatggaaagtggcatccacatgaatcgtacagacctgaaattgatgatgcccctgttttcactccaacggaagaggagtttaaagatccaattagatatattacgagcattcgtccccaagcagaaaagtatggaatttgtcgtattgttccaccatcttcttggcgaccgccttgttctctgaaggagaagaacttctgggaatgtacagagttcaatacccgtgttcaacaagttgacaagcttcaaaaccgggaacccacaaagaaaaaatcacaacctcgagttcagaagaagaggaagaggagaaagagactgagatttgggatgactcacaggcgtcctagtgcaaatacatcagaagactgcgcagatgcagacgagaagtttggctttcaatctggctcagatttcacactagatgagtttcagaaatatgcagatgagtttaagcagcagtattttggaataaagggaagtgacgaaatccctctttctgaaattaaaaagaagaaaaaaaattggcaaccatcggtcgatgaaatagagggagaatattggcggatagttgtatgccccactgacgaagttgaggtggattatggtgctgatttggacacttcaatgttcagtagtggattctctaaattatcttcagattcaaatagacgagatccatatggtttatcttgttggaatttgaacaatcttccacgtattcctgggtctgtactgtcatttgaaactgaggatatatctggcgtcgtagtcccttggctttatgtagggatgtgcttctcatcattctgttggcacgtggaagatcatttcctttattctatgaattacatgcattttggtgaaccaaaagtatggtatggtgttcctggtgctgatgcagtgaagctggaagaagctatgagaaagaacttaccaagattgtttgaagaacagcctgatctcctacatgagctggttacgcaattatctccttctgttcttaaatcagaaggagttcctgtttatcgtgttgttcagaatccaggcgagtttgttctaacgctaccgcgagcttaccattctgggttcaactgtggcttcaactgtgcggaggcagtaaatgtcgcacctgtggattggctgcctcacggacaatgtgctgttgagctctacagggagcagcggcgcaagacatccatatcacatgacaaattattactaaaaactgcaaatgaagctgtcagacagctttggatgaaccttagcgactgcaaaagtgaacaaggagtatacagatggcaggatacttgcggaaaggacggaatgctgacaagtgcaattaagacaagggttaaaatggagaaggcagcacggggagggaatatggcactgcgatataagaaaatggatggggattatgattcagctgaccgggaatgcttttcatgtttttatgatctccatttgtcagctgtcagctgccaatgctccccaaatcgttttgcttgcttaaaccatgcaaacattctatgttcatgtgaaatggacagaaaaaccgcgttgttgcggtataccatagaggagctccatactcttgttgcagctctagagggtgatccaactgcggtctaccagtggggacagaatgatttaggtttagtctgcccatctggttctactcagtacaagaagatggacttgggtgaaaacacggaatttccggattcagcaaccaacgtcaatcatggctgcagcttaggaagtcaagatcaatatcactatgaccccgcaaagccagcaggataccagcaagagaagggaatccagattgcttcagaaaaacatgataagaacaagatggttgtcaatcttgagtctccagcaacagctagtaatccaagcaggtcaaagtctgactgcagtggctcactgtccttgaatcattcatctgagttaccatcttcaagaattcaaacaggaaattctacgctagcttccattaccacagagaaactgtttggtgttgacattaaatccaatttagcacagtcttctgatggccaagttagtcaattggccaagccttcctcgagccaaactgatgaagtctctaagccagcaatagctaagtatacggttgagctgctagacagtggaacaatgatgattggtaaaaagtggtgcaatcagcaagctatattccccaaaggatttaagagtcgagttacatttcatagtgtactagatccaacaaggacatgctgctacatctccgaagttcttgatgctgggcttcttggaccattgtttagggtgactgtcgaaggtcttccagaagtttcgtttactcacacatcaccaatgcaatgttgggacagtgtaagagacagagtaaatgaagaaatagcaaaacaaataagttttggaaaatctggccttcctgattttctatcctgcaattctttgaatggacttgaaatgtttgggttcttatcctcccctataattaaggaaatcgaggctctagatccctgtcaccaatgcttggactattggttgtcaagggtttcttctgttggaactgaactcccctcggaatctgtgatggcagcaatggttaatgactccactaaccccccaataaagttgctcgggattgagattaaccggagggaatcagaacaatcaagtagcttcaataattcctgtgtgaggaggtcacacttggcaggttgctga

SEQ ID NO: 250 - protein, 968 aa, Oryza sativa
MEIASAAAHQIWPMVSSGDPGEEGQRAAAPGPGAAAKKRRMRGGTPSPEPASAPQTNGKWHPHESYRPEIDDAPVFTPTEEEFKDPIRYITSIRPQAEKYGICRIVPPSSWRPPCSLKEKNFWECTEFNTRVQQVDKLQNREPTKKKSQPRVQKKRKRRKRLRFGMTHRRPSANTSEDCADADEKFGFQSGSDFTLDEFQKYADEFKQQYFGIKGSDEIPLSEIKKKKKNWQPSVDEIEGEYWRIVVCPTDEVEVDYGADLDTSMFSSGFSKLSSDSNRRDPYGLSCWNLNNLPRIPGSVLSFETEDISGVVVPWLYVGMCFSSFCWHVEDHFLYSMNYMHFGEPKVWYGVPGADAVKLEEAMRKNLPRLFEEQPDLLHELVTQLSPSVLKSEGVPVYRVVQNPGEFVLTLPRAYHSGFNCGFNCAEAVNVAPVDWLPHGQCAVELYREQRRKTSISHDKLLLKTANEAVRQLWMNLSDCKSEQGVYRWQDTCGKDGMLTSAIKTRVKMEKAARGGNMALRYKKMDGDYDSADRECFSCFYDLHLSAVSCQCSPNRFACLNHANILCSCEMDRKTALLRYTIEELHTLVAALEGDPTAVYQWGQNDLGLVCPSGSTQYKKMDLGENTEFPDSATNVNHGCSLGSQDQYHYDPAKPAGYQQEKGIQIASEKHDKNKMVVNLESPATASNPSRSKSDCSGSLSLNHSSELPSSRIQTGNSTLASITTEKLFGVDIKSNLAQSSDGQVSQLAKPSSSQTDEVSKPAIAKYTVELLDSGTMMIGKKWCNQQAIFPKGFKSRVTFHSVLDPTRTCCYISEVLDAGLLGPLFRVTVEGLPEVSFTHTSPMQCWDSVRDRVNEEIAKQISFGKSGLPDFLSCNSLNGLEMFGFLSSPIIKEIEALDPCHQCLDYWLSRVSSVGTELPSESVMAAMVNDSTNPPIKLLGIEINRRESEQSSSFNNSCVRRSHLAGC

SEQ ID NO: 251 - DNA, 2874 bp, Oryza sativa
  misc_feature (279)..(279): m = adenine or cytosine
  misc_feature (692)..(692): k = guanine or thymine
  misc_feature (748)..(748): y = cytosine or thymine
  misc_feature (765)..(765): m = adenine or cytosine
  misc_feature (780)..(780): r = adenine or guanine
  misc_feature (849)..(849): y = cytosine or thymine
  misc_feature (2844)..(2844): r = adenine or guanine
atggcgaacccgaggagagccatcgcgctgcaaatccacacgcagacgacgcccctcgccgccgcccccgccgccgcgccgtccccctcgctgccgtcgtcgctggtccacttcctgaagcggccggcgtcgttcccattcctgctctccctcttcgtgctcctcacctggatctcgctccgcttccaccacccgtccccttcggcttccgtcctcagggcccccgtcgtgcacgacccccaggccaacctcgtccgttaccccgccgcgctgtacccmacccccatcgccgccgacgggcgcgggtggctacttgaccccgtcgccgctgctcgagacgccggcttaccaggaggagcactggtttgtttatcactacacgtgggacagatccagccaggtggtttacgtggcaatcatcgccaccatacatgcaatgagacatttgtcatctggggtgcaaagacaaaattccggttagaaaatgctgatgtaaatgatagaggatatggggaagccatgattgccgctgatgaggtggccattgttgcaagcgcaagatcaactgcacatgccttgataaatatggatgtgcgaccaaccttcttcttgggatgtcaggacacgccaataaatcccaacagctcgaatactgactacaaggggacttccagttacgaagctattctttkgtttgtcatgccaaatttcttctgtagtagccctctttctctacatcatcctcctytccgacacagcccgcgmacctccacagcattrgccatcaacgaccagcatctcagctttgctcgccttctcgaagcttctgctgccatggcggaccagctytccgaagagcagattggagagttcagggaggccttcagcctcttcgacaaggacggcgacggttctatcaccaccaaggagctaggaaccgtgatgcgaagtctagggcagaacccaacggaggcggagctgcaggacatgatcagcgaggtggacacggacagcaacggcaacatcgaattcaaggagttcctgggcctgatggcgcgcaagctgagggacaaggactccgaggaggagctgaaggaggcattccgcgtcttcgacaaggaccagaacggtttcatctctgccaccgagctccgccacgtgatggccaacatcggggagcggctcaccgacgaggaggtcggcgagatgatcagcgaggccgacgtcgacggcgacgggcagatcaactacgaggagttcgtcaagtgcatgatggccaagaagaggaggaagaggatagaggagaagagggaccacgacggcggcagcaggacgaagagtgcagggccctccgccgcgccggcgagcaagcgtggccagaagtgcgtgatcctaaatagcccctgccgcccacctctggggcggcaagctgacgtggcaaacgggggaggaacgggcggcggccccttgccgccctctggccgggcggcaggcctcgcttcctataaaaggcctgctgcccagcccccagccctcattcttctctcctcaattccagtgaaaaaaaagaagagaggggaggagaagagaagaaggggcgaagccctgccggattcagacgccgatttcagttgtactaatctagaagtgcgtattgtagatatcggtatgtcgaacaaacaaatattccaagtttaccatggaccaggaaacgtccgttacgggccaactgggacaagtgacataacaatcaatgttatagtaagtcgggcaactgagggtttttattgggaactaatgccagttcaaaactctcgagtgtggagatggtatttggaaaatgcattgcaacgcgggtggcctctagctttggttccgtttgttcacccgaaggatccaggtgtgcagacgaacatggatgatggcgagggaccaagtgctgaagtaaacgagacttctgtggaggaggtcaacgcacgagaggacgggggcgtagtagctccagtgggcattcaaccaggtggagtggccgacgagggggagactgtcggtgccattgtggatgaaatggagagggaggattctgacaacgagcgtgtagaggaaggtgattcgtcagatgatgagacggatgatgcatgcctcacaatctttcagaactcagtcaacattcagtactctcttccctacttgcttcattacaaattccgacccggctttcgtcaatggctagacgccgaggtgttgaggatcccaaactggcgtagcgatccttgtgtatacctactaccaccttggtgccagcgtcctctctgcctatgcggtgatcgatgccaactaatggcttcgaggaatcctgatattcgaggaaggcgctttttaggtgccctaactatgaccacccgcactacggcttgcgcatacatcgagtgggtcgatacagaaaatcccgttctcgacctaaccacttgtttacaagaaggtcgctggtatttcgcatccgaaagtactgagcaatacttacagagaaaagcggcttatgaacgacaatgtcgtgaacaacagagcgactggcgggtgctaactacggcactccctccatgggaagcccgtccaagatgcaggtgtggtgatcgttgtcaggttcttcgttccataaatcctacaacattgggtcgaaggttctttgtttgtccaaatattcttgacgacgatttcatggaaccaccaaggagatgtcaatacagagaatggatagacaccagaagggttctaactccacctagccgtgttgtgcagcttgaactaccagagcaatacagggttactaaagcgcggtttgaragaggagagggatcctcacgtaggggttag

SEQ ID NO: 252 - protein, 957 aa, Oryza sativa
MANPRRAIALQIHTQTTPLAAAPAAAPSPSLPSSLVHFLKRPASFPFLLSLFVLLTWISLRFHHPSPSASVLRAPVVHDPQANLVRYPAALYPTPIAADGRGWLLDPVAAARDAGLPGGALVCLSLHVGQIQPGGLRGNHRHHTCNETFVIWGAKTKFRLENADVNDRGYGEAMIAADEVAIVASARSTAHALINMDVRPTFFLGCQDTPINPNSSNTDYKGTSSYEAILWFVMPNFFCSSPLSLHHPPVRHSPRTSTALAINDQHLSFARLLEASAAMADQLSEEQIGEFREAFSLFDKDGDGSITTKELGTVMRSLGQNPTEAELQDMISEVDTDSNGNIEFKEFLGLMARKLRDKDSEEELKEAFRVFDKDQNGFISATELRHVMANIGERLTDEEVGEMISEADVDGDGQINYEEFVKCMMAKKRRKRIEEKRDHDGGSRTKSAGPSAAPASKRGQKCVILNSPCRPPLGRQADVANGGGTGGGPLPPSGRAAGLASYKRPAAQPPALILLSSIPVKKKKRGEEKRRRGEALPDSDADFSCTNLEVRIVDIGMSNKQIFQVYHGPGNVRYGPTGTSDITINVIVSRATEGFYWELMPVQNSRVWRWYLENALQRGWPLALVPFVHPKDPGVQTNMDDGEGPSAEVNETSVEEVNAREDGGVVAPVGIQPGGVADEGETVGAIVDEMEREDSDNERVEEGDSSDDETDDACLTIFQNSVNIQYSLPYLLHYKFRPGFRQWLDAEVLRIPNWRSDPCVYLLPPWCQRPLCLCGDRCQLMASRNPDIRGRRFLGALTMTTRTTACAYIEWVDTENPVLDLTTCLQEGRWYFASESTEQYLQRKAAYERQCREQQSDWRVLTTALPPWEARPRCRCGDRCQVLRSINPTTLGRRFFVCPNILDDDFMEPPRRCQYREWIDTRRVLTPPSRVVQLELPEQYRVTKARFERGEGSSRRG

SEQ ID NO: 253 - DNA, 2076 bp, Oryza sativa
  misc_feature (801)..(801): k = guanine or thymine
atggcctgggagggggttgtcggcgcggttgatgcagctagaatgtcgaagcaacaagtagtggaagcagagcacctgatgaaagctcttctggagcagaaggatggtttagcgcgcagaatattttcgaaagctggaatagataacacatctgtcctgcaagctactgatgagttcatctcgagacagccaaaggttggcgatacaagtggaccgatcattgggtcaagctttgtatcaattttggataatgcaaggaagcataagaaagaatatgctgatgagtttgtatctgttgagcacatattgcgagcattcacagaagataagaggtttggacaacagctgttcagagatctcaaaattggggagaatgagttgaaggaagctatctccgctgtacgtggcagtcagcgggtcacagatcagagtatgtctatttggcacagcgtattgtgcggggagatgttcctgaacctttacagaatagaaagcttatttcattggacatgggagcattacttgctggggctaaattccaaggtcaatttgaagagagacttaaggctgttctgaaggagatcactgcctcgaatgggcagatcatcttgttcattgatgagatccacactattgttggtgcaggctattgacctagttgatgaagcagctgctaagctgaaaatggagataacatcgaaacctattgaattggatgaggtagatagggaaatcataaggcttgaaatggagaagctctcattgaagaatgataccgataaagcctccaaacagcgactktctctaactcatattttcttatctttgttgtagactgacagagttaacctggagattgaagctgctgagagagagtatgatttgaaccgtgcagctgagctcaagtacggaacacttctgtcgctacaaaaacagcttgaagaggctgagaacaaactcatggaattccagcagtcaggcaagtcaatgcttcgagaagaggtgactgatgttgacattgctgagattgttagcaagtggactggtattccagtgtcaaaccttcaacaatctgaaaaggaaaagctactgctattggaagatgtactccacaagagggttattggccaagatattgcagtgaagtcagtggctaatgcaatccgtcgttctagggcaggcctatcagaccctaaccgtcccatagcaagcttaatgtttatgggtccaacaggtgtaggaaagaccgaactggggaaaacactagctgaattccttttcaacacagagaatgctctaatacggattgatatgagcgagtacatggaaaagcatgccgtctcccgtttggttggagcccctcctggctatattggttatggggaagggggccaactgacagaagctgttcgtcgtaggccttattctgtggttcttttcgatgaaattgagaaagcgcaccaggatgtgttcaacatcttattgcaacttttggatgatggaagaataaccgactctcagggcagaacagtcagctttactaactgtgttatcatcatgacttcaaacattgggtcgccattgattcttgatacgcttagaaacacatcagacagcaaggaggcagtttatgaaataatgaagaagcaagtgattgacatggctcggcagtcattccggccagagtttttgaataggatagatgagtacattgtattccagccgctggacaccacagagataaatcgcatcgtggagatccagttgcagctgaaccgagtcaagaaccggctgaggcaacagaagattcatctgcagtacacaccagaagctgtggagcatcttggctctctcggctttgaccctaactacggtgctaggcctgtgaagagggtgatccagcagatggtagagaacgagatcgccctcagtgtcctgaagggcgacttcaaagaagacgacaccgtcctcgtcgacgtgagctccgtggcgatcgcgaaaggccttgctccacagaagaagcttgtcctccagaggttagagaatgcaaacttagagttagtcgccaatgactag

SEQ ID NO: 254 - protein, 691 aa, Oryza sativa
  X_region (278)..(278): Xaa = any naturally occuring amino acid
MAWEGVVGAVDAARMSKQQVVEAEHLMKALLEQKDGLARRIFSKAGIDNTSVLQATDEFISRQPKVGDTSGPIIGSSFVSILDNARKHKKEYADEFVSVEHILRAFTEDKRFGQQLFRDLKIGENELKEAISAVRGSQRVTDQSMSLAQRIVRGDVPEPLQNRKLISLDMGALLAGAKFQGQFEERLKAVLKEITASNGQIILFIDEIHTIVGAGAIDLVDEAAAKLKMEITSKPIELDEVDREIIRLEMEKLSLKNDTDKASKQRLSLTHIFLSLLXTDRVNLEIEAAEREYDLNRAAELKYGTLLSLQKQLEEAENKLMEFQQSGKSMLREEVTDVDIAEIVSKWTGIPVSNLQQSEKEKLLLLEDVLHKRVIGQDIAVKSVANAIRRSRAGLSDPNRPIASLMFMGPTGVGKTELGKTLAEFLFNTENALIRIDMSEYMEKHAVSRLVGAPPGYIGYGEGGQLTEAVRRRPYSVVLFDEIEKAHQDVFNILLQLLDDGRITDSQGRTVSFTNCVIIMTSNIGSPLILDTLRNTSDSKEAVYEIMKKQVIDMARQSFRPEFLNRIDEYIVFQPLDTTEINRIVEIQLQLNRVKNRLRQQKIHLQYTPEAVEHLGSLGFDPNYGARPVKRVIQQMVENEIALSVLKGDFKEDDTVLVDVSSVAIAKGLAPQKKLVLQRLENANLELVAND

SEQ ID NO: 255 - DNA, 2580 bp, Oryza sativa
atggaagtgggtatggctggattcctgtgtggtgctgggtccctcaattctgaaggaaaccttacctgcatggaagagggagacccccagcccagcatctccttggcacgcactccgtcggaaggcgcggcggcggcagtcgacttggatctccttgagcagcttctctcagccgacaacgcctggcttgaagtggcagcaaacacttcacgctcacccaacttctttgctaccccctccaactgcttgacagatgcttcggtcgccaccaccacacctgcaaattcatggtggattcagccgagcggtgcaagcacctcagttcgggaacggtttgaccaagctctagcttacatcagggagacacagagcgacgccgatgtgcttgtgcagctctgggtgccagtcaagggcaacgatggtcagctggtgttgacgacgagcgggcagccattcactctcgatcagaggtccaatagcctcatacagttcagggaggtttcgacaaagtaccagttctctgcagatgttgcttcaggttcctcacctgggctaccagggagggtgttcatcggtaggcttcctgaatggtcaccagacgttcgatacttcaccagctatgagtaccctaggatcaaccatgcacaatatttggatgtccacgggacgatggggctgccggtgtttgagagggggaactactcatgcttaggtgtcatcgagttgatcatgaccaagcagaagctcaacttcacctccgagctcaataccatttgcagtgctctccaggcagttaacctgacaagcacagaagtttcaagcattccgcgcgcaaagcttaacagtgcttcctacaaagatgctttaccagagatactagaagtcctgagagcagcctgcatcacccacaagctaccattagctcagacctgggtcacatgtgctcaacaaggaaagcggggcagtcgccattctgacgagaactacaagtactgcatttccaccattgatgcagcatgctatgtgaatgaaccccggatgcagagcttccacgaggcctgctccgaacaccacctgctacgggggcagggggttgcagggaaagccttcaccacaaaccagccatgcttcctaccagatattggatcctccactaaactggagtacccattgtctcaccatgctaagattttcaatttaaaaggtgcagtggcaatccgattgcgttgcacgcgcacagggattgccgactttgtgctagagttctttctgccaactgactgtgaagtacttgaggagcagaaggcagtgctggactcattatcaggcaccatgagaagtgtttgccaaactttacgtgttgttactgacaaggagatggaggatgaggccatgagagaaatgaatgagctgaactcatttagtcctcggggcaagaacaaagttgaggagttatcctttggagacaacacaagaggggatagagaggaggcatcttggacaaccttagtagggacttcacagaaaggatcagatttagctgaattgcatacacatggaatgttatcacatggagggcatggttcatctcaagctggtgatcaaacaagtaaagaaggtagcaaagtgaaaaggcgtacaaagacggagaagaccgtgagcttgcaggtccttcggcagtactttgctgggagcctgaaggatgcagcaaagagccttggaggtcaaccttcacatgcaccttatagtcagaatgtgagcattgttatcaccctattttttcgtgattcgtgctattgcatgaaggtacaagtgtgcccaaccaccctgaaaagaatatgcaggcagcatggcataaaccgctggccatcacggaagataaagaaagtagaccattctctaaggaaactgcagcaaatcattgattcagttcatggagcagagacagctttccagcttaacaccctctacaaggacctcacaaacacctctgtatcatctggacaacaatttgtcaggaaccaaagttccgattcaagcccttcctgcagtggaggagcaacaaaacattcaccccaggttggagctgatcaggtgaggtcaggatgtcttccacaacatagccctgtccagactctgcaaacagaagctgcttcaataaatgaacatttctcaggtcaggaagcaccaatagatctcttacaggatgttgctgaaaaggcaaatggtgaacagcacatgtctcaaagtccatcatcccccaagcagactgcaaatgtaggtatgagagtaaaggtcacttttggctcagaaaaggtgaggttcagattgaaacctgagtgtgactttcaagaactgaagcaggagatatcaaaacgtctgagtatagcagacatgaattccttgattgtaaagtatttggatgacgattcagaatgggtcttgatgacatgtgatgcagatttacacgagtgttttcatgtttataaactagcagatatccaaacaatcaagatttcagttcatctggctgctagtccaacaacaaggatcaccattggtcacactggtttctcatga

SEQ ID NO: 256 - protein, 859 aa, Oryza sativa
MEVGMAGFLCGAGSLNSEGNLTCMEEGDPQPSISLARTPSEGAAAAVDLDLLEQLLSADNAWLEVAANTSRSPNFFATPSNCLTDASVATTTPANSWWIQPSGASTSVRERFDQALAYIRETQSDADVLVQLWVPVKGNDGQLVLTTSGQPFTLDQRSNSLIQFREVSTKYQFSADVASGSSPGLPGRVFIGRLPEWSPDVRYFTSYEYPRINHAQYLDVHGTMGLPVFERGNYSCLGVIELIMTKQKLNFTSELNTICSALQAVNLTSTEVSSIPRAKLNSASYKDALPEILEVLRAACITHKLPLAQTWVTCAQQGKRGSRHSDENYKYCISTIDAACYVNEPRMQSFHEACSEHHLLRGQGVAGKAFTTNQPCFLPDIGSSTKLEYPLSHHAKIFNLKGAVAIRLRCTRTGIADFVLEFFLPTDCEVLEEQKAVLDSLSGTMRSVCQTLRVVTDKEMEDEAMREMNELNSFSPRGKNKVEELSFGDNTRGDREEASWTTLVGTSQKGSDLAELHTHGMLSHGGHGSSQAGDQTSKEGSKVKRRTKTEKTVSLQVLRQYFAGSLKDAAKSLGGQPSHAPYSQNVSIVITLFFRDSCYCMKVQVCPTTLKRICRQHGINRWPSRKIKKVDHSLRKLQQIIDSVHGAETAFQLNTLYKDLTNTSVSSGQQFVRNQSSDSSPSCSGGATKHSPQVGADQVRSGCLPQHSPVQTLQTEAASINEHFSGQEAPIDLLQDVAEKANGEQHMSQSPSSPKQTANVGMRVKVTFGSEKVRFRLKPECDFQELKQEISKRLSIADMNSLIVKYLDDDSEWVLMTCDADLHECFHVYKLADIQTIKISVHLAASPTTRITIGHTGFS

SEQ ID NO: 257 - DNA, 402 bp, Oryza sativa
atggcgtccaaggcgttcgctctgttcctggccgtgaacctcgtcgtgctcggggtggcaagcgcctgcggcggcagcccgtcgtgcccgacgccgacgccgtcgaccccgaaaccgtcaacgccgaagccgacgccgtcggctttcgggaggtgcccccgcgacgcgctgaagctgggcgtgtgcgccaacgtgctgggcctgatcaaggccaaggtgggcgtgcctccggcggagccgtgctgcccgctgctggaggggctcgtcgacctcgaggcggcggtgtgcctctgcacggccatcaggggcaacatcctcggaatcaacctcaacctccccatcgacctcagcctcatcctcaactactgcggcaagaccgtccccaccggcttcaagtgctaa

SEQ ID NO: 258 - protein, 133 aa, Oryza sativa
MASKAFALFLAVNLVVLGVASACGGSPSCPTPTPSTPKPSTPKPTPSAFGRCPRDALKLGVCANVLGLIKAKVGVPPAEPCCPLLEGLVDLEAAVCLCTAIRGNILGINLNLPIDLSLILNYCGKTVPTGFKC

SEQ ID NO: 259 - DNA, 2556 bp, Oryza sativa
  misc_feature (31)..(31): s = guanine or cytosine
  misc_feature (245)..(245): m = adenine or cytosine
  misc_feature (400)..(400): y = cytosine or thymine
  misc_feature (456)..(456): m = adenine or cytosine
  misc_feature (1850)..(1850): k = guanine or thymine
  misc_feature (2475)..(2475): m = adenine or cytosine
atggcgagccgggaggagagcggcaatggcsgttgccgttgcgcgaagccggcggcggattaccggagctcggacagccggagctcgagccggcggagcacgcggttcaaggaggacaacgagtacgtggagatcacgctcgacgtcaagggcgacgacacggtcgccatccagagcatccgcaacggcgccgacatgcccgaggtcgccctcttggcgcgcggcctcgcgcagcagccgccgcmgtccgcggcgcccggccccggcgggctctcgtcgcggctcaaggcggtgaggaccgagctgaggcggatcgcgtcgtggaagttccccagcggcgttctcagcggcggcggcggcggcggcgacgcgccgggcaacggcaacgaccgccgccctygcctcgaccggagcatgaccggcgccgcccgcgcgctgcgcgggctccagttcctmaactccagcgccgtcaccaatggctggccggaggtggagaagaggttcgagcgcctcgccgtcgacggcttcctcctccgctcccgcttcggccagtgcatcggaatggttggatccgaggagtttgcggttcagatcttcgactcgcttgcgcggcggcgagggatcacggctcagttgctgaccaaggatcagctccgggagttttgggagcagctctctgatccaggatttgatgccaagctgcagactttctttgacatggttgacaagaatgcagatggtcagatcactgaagaggagctcaaagaggtcctcaccctgactgcctctgcaaacaagctgtccaagatcctggagcgcgtcgacgagtacaccgcgctgatcatggaggagctcgatcccgatcaattaggctacatagatctggtgacgcacagctccaacatcagccagctgatcagccagaagctggtgccgacgcacgaccggaacccgctccggcgggggctccggcggctgtcctacttcatggaggacaactggaagcgggtgtgggtgatggcgctgtggctggccatcaacgccggcctcttcacctggaagttcatggcgtacaagcgccacccgacgttcgacgtcatgggctactgcgtctgcgtcgccaagggcggtgccgagaccaccaagttcaacatggccctcatcctcctccccgtttgccggaacaccatcacctggctccgttctcgcaccaagctcggcgccgtcatccccttcaatgacaacatcaacttccacaaggtggtggcagggggagtggtggtaggggtggcgctgcacggggtgactcacctgacgtgcgacttcccgaggctgctgcacgcgagtgatgcggcgtacgagccgatgaagaagtacttcgggcagacacggatcccggactactggtggttcgtgcgcggcgtagaggggatcaccggcgtgatcatggtggtgctcatggccatcgcctacacgctggcgcacccgtggttccgccggagcaagcttagtgacagcaacccgctgaagcggctcagcggtttcaatatgttttggtactcccaccacctcttcgtcatcgtctacatcgccttcgttgtccatggcgtctgcctctacatcaaccggacttggtggaagcagacgacatggatgtaccttgccatccctatcctgctctacgccggtgagcggattttccgggctctgaggtctcatggcttcaccaccgtaaggattgagaaggttgcaatctatcctggcaacgtgatagccatccacatgaccaagccccatgggttcaagtacaagagtggccagtacatctatgttaactgcggcgagatatkcaggcctccgatgaacggccagagcggcctcctccgggctgactgcatgtccatggagcaccattcaaggttccccaagctcctgatcgacgggccgtacggcgcgccggcgcaggactactggaagtacgacgtcctcctcctcatcggcctaggcatcggcgccacccctctcatcagcatcgtcaaggacgtcctcaaccacatctacgacgaccccgagtccgccgcctcgccgcacaccaccaatggcggcggcgccgcggccgcggcgaggagggcgttcatgacgaagcgcgtctacttctactggtgcacgcgggaggagggctcgttcgagtggttccgcggcgtgatgaacgaggtggccgaccgcgacgccgggcgcgagttgatcgagctccacaaccactgcaccagcgtgtacgaggagggggacgcgcggtcggcgctggtgacgatgctccaggcgctccaccacgccaagaacggcgtggacgtggtgtccgggacgcgggtgcgcacccacttcgcgcgcccgagctggcgcgacgtgttcaagcgcgtcgccgtgaaccaccaggggcagcgcttcggcgtcttcttctgcggcgaccaggcgctmacgccggagctccgcggcctcgcccaggacttctcccacaagaccaccaccaaattcgtcttccacaaggagaatttctag

SEQ ID NO: 260 - protein, 851 aa, Oryza sativa
MASREESGNGRCRCAKPAADYRSSDSRSSSRRSTRFKEDNEYVEITLDVKGDDTVAIQSIRNGADMPEVALLARGLAQQPPQSAAPGPGGLSSRLKAVRTELRRIASWKFPSGVLSGGGGGGDAPGNGNDRRPRLDRSMTGAARALRGLQFLNSSAVTNGWPEVEKRFERLAVDGFLLRSRFGQCIGMVGSEEFAVQIFDSLARRRGITAQLLTKDQLREFWEQLSDPGFDAKLQTFFDMVDKNADGQITEEELKEVLTLTASANKLSKILERVDEYTALIMEELDPDQLGYIDLVTHSSNISQLISQKLVPTHDRNPLRRGLRRLSYFMEDNWKRVWVMALWLAINAGLFTWKFMAYKRHPTFDVMGYCVCVAKGGAETTKFNMALILLPVCRNTITWLRSRTKLGAVIPFNDNINFHKVVAGGVVVGVALHGVTHLTCDFPRLLHASDAAYEPMKKYFGQTRIPDYWWFVRGVEGITGVIMVVLMAIAYTLAHPWFRRSKLSDSNPLKRLSGFNMFWYSHHLFVIVYIAFVVHGVCLYINRTWWKQTTWMYLAIPILLYAGERIFRALRSHGFTTVRIEKVAIYPGNVIAIHMTKPHGFKYKSGQYIYVNCGEISRPPMNGQSGLLRADCMSMEHHSRFPKLLIDGPYGAPAQDYWKYDVLLLIGLGIGATPLISIVKDVLNHIYDDPESAASPHTTNGGGAAAAARRAFMTKRVYFYWCTREEGSFEWFRGVMNEVADRDAGRELIELHNHCTSVYEEGDARSALVTMLQALHHAKNGVDVVSGTRVRTHFARPSWRDVFKRVAVNHQGQRFGVFFCGDQALTPELRGLAQDFSHKTTTKFVFHKENF

SEQ ID NO: 261 - DNA, 362 bp, Oryza sativa
  misc_feature (325)..(325): s = guanine or cytosine
atggagagggttgcatcgagctgtctcagccttctggcacaaagaggaggggttactcggtggcggcggccgtggcgaagggagccggccggagggcggacgagaagaaggtggcggcggcggtggccaagcgcacgatggcgaaggccgccgaggagaagacggcgtgggtgccggacccggtgaccgggtactaccggccggccggcggcgcaaaggaggtggacgcggcggagctgcgcgccaagctgctctccaactccaagaggatggctgccaactgagacagatcgtcgacgtatcggtcggtcgaggctaggctatstatgtactctgcgttgagatgcgcgctacctagttga

SEQ ID NO: 262 - protein, 59 aa, Oryza sativa
PPPLRRRPAGSTRSPGPAPTPSSPRRPSPSCAWPPPPPPSSRPPSGRLPSPRPPPPSNP

SEQ ID NO: 263 - DNA, 1161 bp, Oryza sativa
  misc_feature (315)..(315): r = adenine or guanine
atgatgatgatgggggaaggagtcagcagcgttccgccgtggtctcacctccccgtgagcggagtcgatgtactcggcggcggtggtggcggtggggatgagatgacgccgtacgtgatcgccgcgctgcgggattacctgccggcgaatgatgtcggggtgggggctgacgaggaggaggaggccgcggcgatggccgcggcggtggacgcgtacgcgtgcgacgagttccggatgtacgagttcaaggtgcggcggtgcgcgcgcgggcggagccatgactggaccgagtgccccttcgcgcacccgggggaraaggcgcgccgccgcgatccgcgcaagtaccactactccggcaccgcgtgcccggacttccgcaagggcgggtgcaagcgcggcgacgcctgcgagtacgcccacggcgtgtttgagtgttggctccacccggcgcgctaccgcacccagccgtgcaaggacggcaccgcctgccgccgccgcgtctgcttcttcgcccacaccccggaccagctccgcgtcctcccggcgcagcagtccagccccaggagcgtggcgtcctcgccgctggccgagtcctacgacggctcgccgctgcgccgccaggcgttcgagagctacctcaccaagaccatcatgtcctcgtccccgaccagcaccctcatgtctccgcccaagtcgcccccgtcggagtccccgccattgtcgcccgacggtgccgcggccatccgtcgcggatcttggcccggcgtcggctcgccggtgaacgacgtcctggcctcgttccgccagctccgcctcaacaaggtgaagtcgtcgccgtccggcgggtggagctacccttcgtcgtccgccgtctacgggtctcccaaggccgccaccggcctctacagcctccccaccactccactggcttccacggcaacggtgaccaccgcctccagcttcatgcccaacctggagccactggacctcgggctcatcggcgacgaggagccggtccagagggtggagtccggaagagccctccgggagaaggtgttcgagcgactgagccgggatggtgccatctccggcgacgccacagccttcgccaccgccggtgttggcctcgacgttgattgggtgtccgacctcatcaactga

SEQ ID NO: 264 - protein, 386 aa, Oryza sativa
MMMMGEGVSSVPPWSHLPVSGVDVLGGGGGGGDEMTPYVIAALRDYLPANDVGVGADEEEEAAAMAAAVDAYACDEFRMYEFKVRRCARGRSHDWTECPFAHPGDKARRRDPRKYHYSGTACPDFRKGGCKRGDACEYAHGVFECWLHPARYRTQPCKDGTACRRRVCFFAHTPDQLRVLPAQQSSPRSVASSPLAESYDGSPLRRQAFESYLTKTIMSSSPTSTLMSPPKSPPSESPPLSPDGAAAIRRGSWPGVGSPVNDVLASFRQLRLNKVKSSPSGGWSYPSSSAVYGSPKAATGLYSLPTTPLASTATVTTASSFMPNLEPLDLGLIGDEEPVQRVESGRALREKVFERLSRDGAISGDATAFATAGVGLDVDWVSDLIN

SEQ ID NO: 265 - DNA, 2102 bp, Oryza sativa
atggcctcggagacggagacgttcgccttccaggcggagatcaaccagctgctgtcgctcatcatcaacacgttctactccaacaaggagatcttcctccgcgagctcatctccaactcctccgatgcgttggacaagatcaggttcgagagcttgacggacaagagcaagctggatgctcagccagagctgttcatccatattgttcctgacaaggcctccaacacactgtcgatcattgacagtggtattggtatgaccaagtcagatcttgtgaacaacctgggtaccattgccaggtcagggactaaggagtttatggaggcactggctgctggtgctgatgtgtccatgattggtcagttcggtgttggattctactctgcctaccttgttgccgagagagtagttgtgaccaccaagcacaacgatgacgagcagtatgtgtgggagtctcaggctggtgggtccttcactgtcacacgtgacacatctggggagcagcttgggaggggtactaagatcaccctctacctcaaggatgatcagcagttggaataccttgaagagcgccgcctcaaggacctgatcaagaagcactctgagtttatcagctaccctatctctctatggactgagaagaccactgagaaggaaatttctgatgatgaagatgaggaagagaagaaggatgctgaggagggcaaggttgaggatgttgatgaagagaaggaagaaaaggagaagaaaaagaagaagatcaaggaggtttctcatgagtggtccctggtcaacaaacagaagcctatctggatgaggaagcctgaggagatcactaaggaggagtatgctgctttctacaagtccctgacaaacgactgggaggagcatcttgctgtcaagcacttctctgtggagggtcagctggaattcaaagctgttctctttgttcccaagagggcaccattcgacctctttgatacgaggaagaagctcaacaacatcaagctctacgtccgccgagtcttcatcatggacaactgtgaggagctgatccctgagtggctgagctttgtcaagggcattgttgactccgaggatcttcccctcaacatctcccgtgagatgctgcagcagaacaagattctcaaggtcatcaggaagaaccttgtcaagaagtgcgttgagctcttcttcgagattgctgagaacaaggaagactacaacaagttctatgaagccttctccaagaacctcaagctcggtatccacgaggactccaccaacagaaacaagattgccgagctcctgaggtaccactccaccaagagcggcgatgagctgaccagcctcaaggattacgtgacgaggatgaaggaaggccagaacgacatatactacatcaccggcgagagcaagaaggccgtggagaactcccccttcttggagaagctgaagaagaagggttacgaggtcctctacatggttgatgccatcgacgagtatgctgttggccagctcaaggagtttgagggcaagaagctcgtctctgccaccaaggagggactcaagcttgatgagagcgaggacgagaagaagcggaaggaggagctcaaggagaaattcgagggtctctgcaaggtcatcaaggaggtgctcggagacaaggtcgagaaggtggtggtctcggaccgtgtggtggactccccgtgctgcctcgtcaccggcgagtatggctggacggccaacatggagaggatcatgaaggcccaggcgctgagggactcgagcatggccgggtacatgtcgagcaagaagacgatggagatcaacccggagaacgccatcatggaggagctccgcaagcgcgccgacgccgacaagaacgacaagtccgtcaaggacctcgtcttgctcctcttcgagacggccctcctcacctccggcttcagcctcgacgaccccaacaccttcggcagcaggatccaccgcatgctcaagctcggcctgagcatcgacgaggacgagacggcggaggccgacaccgacatgccgccgctcgaggacgacgccggcgagagcaagatggaggaggtcgacta

SEQ ID NO: 266 - protein, 700 aa, Oryza sativa
MASETETFAFQAEINQLLSLIINTFYSNKEIFLRELISNSSDALDKIRFESLTDKSKLDAQPELFIHIVPDKASNTLSIIDSGIGMTKSDLVNNLGTIARSGTKEFMEALAAGADVSMIGQFGVGFYSAYLVAERVVVTTKHNDDEQYVWESQAGGSFTVTRDTSGEQLGRGTKITLYLKDDQQLEYLEERRLKDLIKKHSEFISYPISLWTEKTTEKEISDDEDEEEKKDAEEGKVEDVDEEKEEKEKKKKKIKEVSHEWSLVNKQKPIWMRKPEEITKEEYAAFYKSLTNDWEEHLAVKHFSVEGQLEFKAVLFVPKRAPFDLFDTRKKLNNIKLYVRRVFIMDNCEELIPEWLSFVKGIVDSEDLPLNISREMLQQNKILKVIRKNLVKKCVELFFEIAENKEDYNKFYEAFSKNLKLGIHEDSTNRNKIAELLRYHSTKSGDELTSLKDYVTRMKEGQNDIYYITGESKKAVENSPFLEKLKKKGYEVLYMVDAIDEYAVGQLKEFEGKKLVSATKEGLKLDESEDEKKRKEELKEKFEGLCKVIKEVLGDKVEKVVVSDRVVDSPCCLVTGEYGWTANMERIMKAQALRDSSMAGYMSSKKTMEINPENAIMEELRKRADADKNDKSVKDLVLLLFETALLTSGFSLDDPNTFGSRIHRMLKLGLSIDEDETAEADTDMPPLEDDAGESKMEEVD

SEQ ID NO: 267 - DNA, 1560 bp, Oryza sativa
  misc_feature (310)..(310): k = guanine or thymine
atggcgttgcaaacgcagccggtaccaaatgcgtcacctcttcatggttcttcggtccgtatgcgtcctcctcctggccgcgtcggcgacggtggcggcgcggcgccacggcccggcggcgcccatcgccgggcagagcatgtacctggcgccgagctgccgcgcgcacacggcgtcgctgacggacttcggcggcgtgggcgacggcacgacgtcgaacacggcggctttcaagtcggcggtggaccacctgtcgcagtactccggcgagggcggcggcggggcgatgctgtacgtgccggcggggaaktggctcactgggccgttcaacctgacgagccacttcaccctgttcctccacagcgacgccgtcatcctggggtcccaggacatgggcgagtggcccatcatcgatcccctcccgtcgtacggccgcggccgcgacaaggccggcggccggtacgcgagcctgatcggcgggtccaacctgacggacgtggtgatcaccggcgcgaacgggacgatcgacgggcagggggcgatgtggtggtccaagttccattcgaacaagctcaagtacacgcgtgggtacctgatcgaggtgatgcactcggacacggtggtgatatcgaacgtgacgctggtgaactcgccggcgtggaacatccacccggtgtacagcagcaacatcgtggtgcagggggtgacgatcctggcaccgacgcactcgcccaacaccgacggcatcaacccggactcgtgctcccacgtccgcatcgaggactgctacatcgtgtccggcgacgactgcgtggcgatcaagtccgggtgggacgagtacgggatcgcgtacgggatgcccagccagcacatcgtggtgcggaggctgacgtgcgtgtcgccgacgagcgcggtgatcgcgctgggcagcgagatgtcgggcgggatcagcgacgtgcgggcggaggacataacggcggtgaactcggagtcggcggtgcggatcaagacggcggtggggcgtggggcgtacgtgcgcgacgtgttcgtccgggggatgtcgctggacaccatgaagtgggtgttctggatgacggggaactacaagtcccacccggacgacggctacgaccccaacgccatccccgtcgtggacaacatcagctaccaggacgtggtggccacgggggtgtacaaggaggccgccaggctggagggcatccagggcgcccccttccgcggcatctgcatcgccaacgtcaccgccacgctctccaagtcgcgcaagtacccgtggacctgcaccgacatcgagggggtgtccaccggcgtcacgccggcgccgtgccagccgctgcagggggcgcacgatggcgcctgcccgttccccacggacacgctgcccatcgaccagctcgtcatgcagcagtgcgcctactccgtcccggcctccatctagctgatctggctgcagcctgcagcgctgtagctgtagctgtgaccgtcgttactactacaacactagcctctgcgtgcggtcttctgaaacaaaaacaataa

SEQ ID NO: 268 - protein, 486 aa, Oryza sativa
  X_region (103)..(103): Xaa = any naturally occuring amino acid
  X_region (300)..(300): Xaa = any naturally occuring amino acid
GVANAAGTKMRHLFMVLRSVCVLLLAASATVAARRHGPAAPIAGQSMYLAPSCRAHTASLTDFGGVGDGTTSNTAAFKSAVDHLSQYSGEGGGGAMLYVPAGXWLTGPFNLTSHFTLFLHSDAVILGSQDMGEWPIIDPLPSYGRGRDKAGGRYASLIGGSNLTDVVITGANGTIDGQGAMWWSKFHSNKLKYTRGYLIEVMHSDTVVISNVTLVNSPAWNIHPVYSSNIVVQGVTILAPTHSPNTDGINPDSCSHVRIEDCYIVSGDDCVAIKSGWDEYGIAYGMPSQHIVVRRLTCVXSPTSAVIALGSEMSGGISDVRAEDITAVNSESAVRIKTAVGRGAYVRDVFVRGMSLDTMKWVFWMTGNYKSHPDDGYDPNAIPVVDNISYQDVVATGVYKEAARLEGIQGAPFRGICIANVTATLSKSRKYPWTCTDIEGVSTGVTPAPCQPLQGAHDGACPFPTDTLPIDQLVMQQCAYSVPASI

SEQ ID NO: 269 - DNA, 1143 bp, Oryza sativa
  misc_feature (963)..(963): m = adenine or cytosine
atgaaatatttcccttgcaattatgtacgcgttcctaaaatccttgcgttccaaattaaggaaatcgctgtgtacacaaaaattaaatccaaaattagttgcttaattattacagctgaaataaacaggcctaagttgaaacggagagagtacgtagcaaaatcaatcagagctgggtgcatatgcaacgaattaaatcggagatcgaacggtcgatcgaaactaaagcagtgtactgcatgcaacggcttgcaatgtgtgtaccagtctaaccacttagctcgatccaacgatcgaaaacaatttggtaacgtcagcctcactcctcctccattgctacctcaagctccagctcgagctcgaggctttgctttggccgcaatgccggagctggaggtgtgtagccctgcgtcgtcgggtggggcgtcgccgccggagtcgccggtggaggggaggaggggaggaggaggaggggagaagagggggagatcaggggatggcgggaggcacccgtcgtaccgcggcgtgcggatgcgggcgtgggggaagtgggtgtcggagatcagggagccccggaagaagtcgcgcatctggctcggcacgttcccgacgccggagatggccgcgcgcgcccacgacgccgccgcactcgtcgtcaagggccccgccgccgtcctcaacttcccggacatggccgcctcgctcccgcgcccggcctccgcctccccgcgcgacgtccaggccgccgccgcccgcgccgccgccatggagcccccccagccgccgccgtcgtcgctcaccgtgcaggccgactccgccgccgccgcattcctgacgcccaagaacggcggtttcagcggcgccggcgcggcggacgacgagctcgaggcgatcgtcgagctgccgcggcttcgacgagctggaagccgccgagctcgtgtttcggcgccgcgtttccaggamacggcggcggaaaaacccgttgtgtgcgacccgttctggaatcgacggcggctaagcggcggccgccgcggcggcggcggcggccgcggcgcacgacgacctgttcggcctcgacgccgaccaccatggatgggcccagtcggttggtgccctcttatggaacctgtgattcgatcataa

SEQ ID NO: 270 - protein, 379 aa, Oryza sativa
MKYFPCNYVRVPKILAFQIKEIAVYTKIKSKISCLIITAEINRPKLKRREYVAKSIRAGCICNELNRRSNGRSKLKQCTACNGLQCVYQSNHLARSNDRKQFGNVSLTPPPLLPQAPARARGFALAAMPELEVCSPASSGGASPPESPVEGRRGGGGGEKRGRSGDGGRHPSYRGVRMRAWGKWVSEIREPRKKSRIWLGTFPTPEMAARAHDAAALVVKGPAAVLNFPDMAASLPRPASASPRDVQAAAARAAAMEPPQPPPSSLTVQADSAAAAFLTPKNGGFSGAGAADDELEAIVELPRLRRAGSRRARVSAPRFQTAAEKPVVCDPFWNRRRLSGGRRGGGGGRGARRPVRPRRRPPWMGPVGWCPLMEPVIRS

SEQ ID NO: 271 - DNA, 2205 bp, Oryza sativa
atggactttactctatcttcatttccgcacaacgttgactgggtcattacatcattttccctctacatcgtgtacatgggggagaagaagcatgatgatccgtctgttgtcacggcatcgcatcatgacacgcttacttctgttcttgggagtaaggatggcgccatgaagtctatagtgtacagttacaaacatgggttctctggatttgcagcgatgctcaccgaatcccaagctgaggaacttgcaagattacctgaagtcatcagcgtgaagcctaacacttaccatcaagcacaaacgactcgaagctgggattttctcggccttaactacaacgaacaatcaggtcttctaaagaaagcaaagaacggtgaagatgtcattgtcggtgtcatcgattcaggtatatggcccgaatcacgaagcttcgatgacaatggctacagtcccgtgccagcacgatggaagggcaagtgccagaccggcgcggcgttcaacgccaccacgggttgcaacaggaagatcatcggcgtacgatggtactcgggcggcattcccgacgagaacctgaagggcgagtacatgtcggcgagggacctcggcggccacggcacgcacgtcgcctcgacgatcgtcggcgggcaggtacggaacgtgagccacagacagggcggcgccctggctgccggcacggcgcgcggtggggcgccgcgcgcgcgggtcgcggtctacaaggtgtgctggggcctgcgcgcccagtgtggcggagccgcgatcctcgccgccatcgacgacgccatgaacgacggcgtggatgtgctgtccctgtcgataggaggcgcgggcgagcattacgagacgctccacgccgtggcgagagggatccccgtcgtgttcggtggcgggaacgacggccccacgccgcagatcgtgaggaacaccgtgccgtgggtcatcacggtggccgcctccacgatcgacagggccttccccacggtgatatcgctcgggaacaacaagaaatttgtggggcaatctctttactacaatgcaacagcaagcagcaccaaatttcaaatgcttgttgatggatcaagctgcgacacgcagacgttggcgtcgatcaacatcaccagcaaggtcgtgctgtgctcgccgccgtcgctgatgccacctcggctgtcgctgggcgacatcatcggccgtgtcatcaaggcaggcgccaatggcctcatcttcgtgcagtactccgtcagcaacgcccttgattttctgaatgcctgcagccgcgccagcgtgccatgtgtactggtggactacgagatcacacgcaggatcgagtcatacatgaccagcacaagcacgcccatggtgaaggtgtcgtcggccatgacggtggtcgggagtggggtgctctcaccaaggatcgctgcattctcgtcaagaggaccgagctccttgtttcccggaatactgaagcctgatattgctgcgccgggagtcagtatcctcgcagctgtgggtgattcgtacgagctcaagtctgggacgtccatggcgtgcccgcatgtatcagcagtggtggcgttgctcaagatggttcacccggactggtcgcctgccatgatcaagtccgccatcgtcactactgcttcggtgacagatcgttttggcatgccaatccaagctgaggcagtgccaaggaaagtggctgacccattcgacttcggtggtggccacatcgaaccgaataaagccattgaccctggcctagtatatgacattgatccaagccactacactaagttcttcaactgcacccttcctgaagctgaggatgactgcgagtcctacatggagcaaatctatcagctcaacctcccgtcaattgcagtgccaaacctaaaggactctgtcacggtttggcggactgtcaccaatgttggagaagcagaagcaacttaccatgcagcgcttgaggcaccggttggtatgactatgtcagtggaaccttcggtgatcacattcactaggggtggtagtagaagtgtaacatttaaggtgacattcacaacaacacagagagtacaaggtggctacacgtttgggagtttgacatggctagatggtaacacacactctgtgagaattccgattgcagttcgcaccataatccaggactttgttgctgatacttcataa

SEQ ID NO: 272 - protein, 734 aa, Oryza sativa
MDFTLSSFPHNVDWVITSFSLYIVYMGEKKHDDPSVVTASHHDTLTSVLGSKDGAMKSIVYSYKHGFSGFAAMLTESQAEELARLPEVISVKPNTYHQAQTTRSWDFLGLNYNEQSGLLKKAKNGEDVIVGVIDSGIWPESRSFDDNGYSPVPARWKGKCQTGAAFNATTGCNRKIIGVRWYSGGIPDENLKGEYMSARDLGGHGTHVASTIVGGQVRNVSHRQGGALAAGTARGGAPRARVAVYKVCWGLRAQCGGAAILAAIDDAMNDGVDVLSLSIGGAGEHYETLHAVARGIPVVFGGGNDGPTPQIVRNTVPWVITVAASTIDRAFPTVISLGNNKKFVGQSLYYNATASSTKFQMLVDGSSCDTQTLASINITSKVVLCSPPSLMPPRLSLGDIIGRVIKAGANGLIFVQYSVSNALDFLNACSRASVPCVLVDYEITRRIESYMTSTSTPMVKVSSAMTVVGSGVLSPRIAAFSSRGPSSLFPGILKPDIAAPGVSILAAVGDSYELKSGTSMACPHVSAVVALLKMVHPDWSPAMIKSAIVTTASVTDRFGMPIQAEAVPRKVADPFDFGGGHIEPNKAIDPGLVYDIDPSHYTKFFNCTLPEAEDDCESYMEQIYQLNLPSIAVPNLKDSVTVWRTVTNVGEAEATYHAALEAPVGMTMSVEPSVITFTRGGSRSVTFKVTFTTTQRVQGGYTFGSLTWLDGNTHSVRIPIAVRTIIQDFVADTS

SEQ ID NO: 273 - DNA, 528 bp, Oryza sativa
atggagttgtcggtggtcggcggcgagccgttgctggcggtggcgatgcagcagctgctggacctggacctccccgatgagctggagcggcagctcaacccgccgacgcgcgcctacgtgcgcgaccgccgcgccatggccaacacccccatggacgtcaaggagctccgggcctccggcgcgctcgtgctcgccgtcgacatgcccggcgtcgcccccgccgacgtccgggtcgaggtcgaggacggcaacgtgctcgccatcagcggcgagcgcaggcgccccgccggcgacggcgacgacggcggcgagggggtgaagtacctgaggatggagcggcggatgggcaagttcatgaggaggttcccgctgccggagagcgccgacctcgacggcgtccgcgccgagtacaaggacggggtgctcaccgtcaccgtcgacaagaagccgccaccggagcccaagaagccgcgcgtcgtcgaggtcaaggtcgccggcgccggcgagcccaagggcaagggcaagtag

SEQ ID NO: 274 - protein, 175 aa, Oryza sativa
MELSVVGGEPLLAVAMQQLLDLDLPDELERQLNPPTRAYVRDRRAMANTPMDVKELRASGALVLAVDMPGVAPADVRVEVEDGNVLAISGERRRPAGDGDDGGEGVKYLRMERRMGKFMRRFPLPESADLDGVRAEYKDGVLTVTVDKKPPPEPKKPRVVEVKVAGAGEPKGKGK

SEQ ID NO: 275 - DNA, 718 bp, Oryza sativa
atggagtggcggccggcgaccgcgacgtggtacggcgacgccgaaggcgacggcagcacccgtcaggcggggcgtgtgggtatggatcgctggtggacgtggtgccgatgaaggcgcgggtggggtcggtgagcccggtgctgttcaaggacggcgagggctgcggcgcctgctacaaggtgaagtgcctcgaccacggcatctgctcccgccgcgccgtcacggtcatcgtcaccgacgagtgccccggcgggctgtgcgccttcggccgcacgcacttcgacctcagcggcgccgcattcagcaggatggcggtcgccggcgccggcggccacctgcgagaccgaggccagctgtcggtcgtctacagaagtataccaggactgcgtgcaagtacggcgggaagaacatagccttccgtgtaaacgagggctcgacgaacttctggctgtcactgctggtcgagttcgaggacggccagggcgacattggatccatgcagataaagcagcaggcgaactcagtggagtggctggacatgaagcatgtgtggggggccacgtggtgcctcgtgcggggcccgcttgtcgggcccttctcggtgaggttgacgacgctgtcggcccagaaggcgctcacggcccgggacgtcatccccaggaactggaagcccacggccacctacacctcgcgcctcaacttcgaggccgccctctga

SEQ ID NO: 276 - protein, 239 aa, Oryza sativa
  X_region (191)..(191): Xaa = any naturally occuring amino acid
MEWRPATATWYGDAEGDGSTSGGACGYGSLVDVVPMKARVGSVSPVLFKDGEGCGACYKVKCLDHGICSRRAVTVIVTDECPGGLCAFGRTHFDLSGAAFSRMAVAGAGGHLRDRGQLSVVYRSIPGLRASTAGKNIAFRVNEGSTNFWLSLLVEFEDGQGDIGSMQIKQQANSVEWLDMKHVWGATWCLXVRGPLVGPFSVRLTTLSAQKALTARDVIPRNWKPTATYTSRLNFEAAL

SEQ ID NO: 277 - DNA, 567 bp, Oryza sativa
atggccaagcccgcctcccgcgctgccaagcccgcgtcggcgccgaagaagcagaaggcaaagccctccgccgccgccggtggctcctcccacccgccttatttcgagatgatcaaggaggcgatcacggtgcttaaggagaggaccggctcgagcgcgcacgccatcgccaagtacatggaggagaagcacggggcgtcgctgccggccaactacaagaagatgctctccatccagctgcgcgggttcgcttccaagggcaagctcgtcaaggttaaggcctcctacaagctctccgacgccgccaaggactcgcccaaggccaagcctgccgcccccgcccccaaggcagcagcgccgaagccagcgaaggacgccgccaaacccaagaaggacgccgccgctgccaaacccaagaaggcccccgccgctggcaccaagcgcaaggcgccggagaagaaggtggtcgccaagcccaagaagtctccggcggcgaaggcgaaggccaagcccaagaccgtccggtcgccggccgcgaagaagacccgcaaggcacctgcagcttga

SEQ ID NO: 278 - protein, 188 aa, Oryza sativa
MAKPASRAAKPASAPKKQKAKPSAAAGGSSHPPYFEMIKEAITVLKERTGSSAHAIAKYMEEKHGASLPANYKKMLSIQLRGFASKGKLVKVKASYKLSDAAKDSPKAKPAAPAPKAAAPKPAKDAAKPKKDAAAAKPKKAPAAGTKRKAPEKKVVAKPKKSPAAKAKAKPKTVRSPAAKKTRKAPAA

SEQ ID NO: 279 - DNA, 1191 bp, Oryza sativa
atgccgctcttctgcaagcacggcgccggctttcttgccgtcgccgtgtctacatccatcgtcttcctcctcctccttcacgccttctcgctgccggcctcggcgctctccttcgggctagcgcgccgccaccggaaagacgccgccgtgagctgcgacgtcttcagcggcagctgggtccgcgacgacggcggcggcggcgcggcggcgtacaccgggtacaactgcccggtcatcgacgcggagttcaactgccagctgtacggccggccggactccgactacctccggtaccggtggaagccggccggctgcgagctacccaggtttgatggcgcggacttcttgacgcggatgaaggggaagacggtgatgttcgtcggcgactcgctgggccggaaccagtgggagtcgctcatctgcctgctgcacgccgcggcgccgcagtcgccggcgcagctcgtctccgtcgaccctctctacacgtacaagttcctggagtacggtttggtggtatcgttctaccgcgcgccgtacctggtggacatcggcgtggctcaggggaagaaggtgctatggctggacgacatctccgggaacggcgaggcgtggcgcggcgccgacgtgctctccttcaactccggccactggtggacgcacaccggcacgctccaggggtatgtattgtgggattacatgggcgcggacgggcggtactacgaggacatggaccggatggtggcgttccagcgcgggatggcaacctgggccaactgggtggacgccaacgtcgatccagccaagacccgtgtcttctaccagtccatgtcccccacacactacagctcgaaggagtgggccaacccggtgtcgaagaactgctacggcgagacggccccggcggcggcggcggcggcggggctgaacgcgacgacggcgcaggcgacgtcggggcaggaccaggtgatacaggccacgctgcggtcgatgaagagccccgttcgcctcctcgacatctcggcgctgtcggcgctgcgcaaggacgcgcacccgtcggtgtacagcggcgacctctcgccggcgcagcgcgcaaaccccggcggcggctcggcggactgcagccactggtgcctccccggcctgccggacacgtggaaccagctcttctatgcgcttctcttctaccaatag

SEQ ID NO: 280 - protein, 396 aa, Oryza sativa
MPLFCKHGAGFLAVAVSTSIVFLLLLHAFSLPASALSFGLARRHRKDAAVSCDVFSGSWVRDDGGGGAAAYTGYNCPVIDAEFNCQLYGRPDSDYLRYRWKPAGCELPRFDGADFLTRMKGKTVMFVGDSLGRNQWESLICLLHAAAPQSPAQLVSVDPLYTYKFLEYGLVVSFYRAPYLVDIGVAQGKKVLWLDDISGNGEAWRGADVLSFNSGHWWTHTGTLQGYVLWDYMGADGRYYEDMDRMVAFQRGMATWANWVDANVDPAKTRVFYQSMSPTHYSSKEWANPVSKNCYGETAPAAAAAAGLNATTAQATSGQDQVIQATLRSMKSPVRLLDISALSALRKDAHPSVYSGDLSPAQRANPGGGSADCSHWCLPGLPDTWNQLFYALLFYQ

SEQ ID NO: 281 - DNA, 831 bp, Oryza sativa
  misc_feature (22)..(22): y = cytosine or thymine
  misc_feature (35)..(35): s = guanine or cytosine
atgcgatcggtaccggcccatyttcctccttccgstcctcatcgggctgccattggggagaagcgcggatgtcagggggagtgggagcagatcagtggcaccaacgacgagctggttcatgccagcgtgctcgccaggatgccacaagggaaaccgtttttgtcagtagatgagatcaaggcagaaacgctggaaataatccttgctaccgtggacaacccatcaaatgctgtagagtgggcactggcagagatggtgaacaatccaaaggtcatgaagaaagcagtggatgaactcgatatggttgttggtagagaaaggcttgttgaggaatccgacattcacaacctcacatacctcaaggcatgtatccgggaggcgttccgcctccacccctaccacccattcaacccaccccatgtcgcgatcgcagacaccaccgtcgcgggatacatgatcccaaagggtagccatgtcatgttaagccgaattgggctcggtcgaaaccctagagcatgggataaaccactcgaattccaaccagagcgacatctgaaaaatactggtactgtggtgctagctgagccagagttacgttttgtatcgttcagtgctggtaggcgtggctgtcctgccgtgtcactcggaacatcaattacaatgatgctatttgcaaggcttctgcaggggttcagttggagcataccaccaggtggtgacaggattgagcttcaagagtcagctacaagcctgcaattgtctaaaccattacttatgcaagcaaaaccacgattactacttcatctatatgaggcggatgtattaaattag

SEQ ID NO: 282 - protein, 276 aa, Oryza sativa
MRSVPAHLPPSAPHRAAIGEKRGCQGEWEQISGTNDELVHASVLARMPQGKPFLSVDEIKAETLEIILATVDNPSNAVEWALAEMVNNPKVMKKAVDELDMVVGRERLVEESDIHNLTYLKACIREAFRLHPYHPFNPPHVAIADTTVAGYMIPKGSHVMLSRIGLGRNPRAWDKPLEFQPERHLKNTGTVVLAEPELRFVSFSAGRRGCPAVSLGTSITMMLFARLLQGFSWSIPPGGDRIELQESATSLQLSKPLLMQAKPRLLLHLYEADVLN

SEQ ID NO: 283 - DNA, 1551 bp, Oryza sativa
atggcagcctgtgcagccagtactgcaaccatagattgggagctcctggaagcggccatatctggtgataccaggtcaatgaagatgaagtacatggattcacatgatcctacaattctgcttggaaaaaatccacaaggaaacacatgtcttcatatatcttccatgtgtggccatttggaattttgcaaagatgttctttcacttccacaggatccaaccgtgaagaagaaactactcactactgtgaatgtgatgaatgagacgccactgcttactgccataacaagtggccatgttactttagctgcttttctactcaaatactgccatgaacaaggattcagtgaggtaatcttgaaacaggacaagcacaaatgtaatgcactgcaccatgccatttgcaacggccacaaggacctggcactggagttgatagcgactcagcctgccttgtccaaagatgtcaacaaatacggcgagtctcccatgtacattgcgttgatgatgagggattctaagtttacagatatttttgagaaactgttgggaattgatggttcttctcattcaggaacctatggctacaatgctctccatgcagctattagaaatggaaatccagatattgctaaaagaatcatcgttgaacgcccaaatctggccacagaagaaaataaggatggtaatactccaattcagctagctatgctccatattgcaaaaaagatgggtggacatgtcttcataaagctgtcaaatcagaaactcgtgaacatgcgtagcagcaaggggaaaacagctctacattatgccatccagaagtgtgatccgaaaattgttgctgctttacttgacaagaaaatagacttgacaattcttggcagtgacggtaatgcagccgcttgggaattacgggatgccttggatagtgcgaagacattaaactggaatgaagtgtcaatgcttatgattaaagctgatcctccaaatgcaaaatccgtttataatcttcacgaggaagccaaagaaaagttgatcaatgcgtcaaggaaggatgcaaggtcgctgactcaaacatacacaagcaacacttcgctagtggcgatcctcatcgcaacaattacctttgctgctgctttcaccctgcctggaggatacagcagtgatgctggaagccagggacttcctataatggcaaggaacgttgcctttaaggcattcttgatatcagataccttagcaatgtgcgcctcacttgctgttgcgttcatatgcatcatagcaagatgggaggatctcgatttcttgctttactacagatccttcaccaagaagcttatgtggttcgcgtacatggcaacaactacagcatttgcaaccggtttatacacagtattggcccctcggctgctatggttagctgttggaatttgctctgttgctgttttagtgccaattctcactaaggtgctcggggaatggcctgtcttaaagctcagaattcggttgggccaagctttcaaatcagagttccttgatatggtctga

SEQ ID NO: 284 - protein, 516 aa, Oryza sativa
MAACAASTATIDWELLEAAISGDTRSMKMKYMDSHDPTILLGKNPQGNTCLHISSMCGHLEFCKDVLSLPQDPTVKKKLLTTVNVMNETPLLTAITSGHVTLAAFLLKYCHEQGFSEVILKQDKHKCNALHHAICNGHKDLALELIATQPALSKDVNKYGESPMYIALMMRDSKFTDIFEKLLGIDGSSHSGTYGYNALHAAIRNGNPDIAKRIIVERPNLATEENKDGNTPIQLAMLHIAKKMGGHVFIKLSNQKLVNMRSSKGKTALHYAIQKCDPKIVAALLDKKIDLTILGSDGNAAAWELRDALDSAKTLNWNEVSMLMIKADPPNAKSVYNLHEEAKEKLINASRKDARSLTQTYTSNTSLVAILIATITFAAAFTLPGGYSSDAGSQGLPIMARNVAFKAFLISDTLAMCASLAVAFICIIARWEDLDFLLYYRSFTKKLMWFAYMATTTAFATGLYTVLAPRLLWLAVGICSVAVLVPILTKVLGEWPVLKLRIRLGQAFKSEFLDMV

SEQ ID NO: 285 - DNA, 1370 bp, Oryza sativa
  misc_feature (141)..(141): y = cytosine or thymine
  misc_feature (147)..(147): s = guanine or cytosine
atgcgccgctactccgcgctgcccggcggcggcgcccgccccgacacgctcgccgaccgcctccaccgctaccgcggcgtcctcctcgtcatcctcgccccgctcgccctcgtctccctcgtcctcctcctcatgccgcgytccccsgcctcctcctccgccgccgccggcaggaggtggggccccctcgacgccaacaagtacgccgtcattttcgacgccgggagctccgggagccgcgtccacgtcttccgcttcgacgccaacctcgatctgctccacattggcgaccagatcgagctcttcgtccagttgcagaaaaagccggggcttagcgagtacgccaataacccgcaggaggctgccaaatcgctcgtctctctccttgaggatgccaaacgagtggttcccgtggaattgcgcggccagactcctgttagagttggggccaccgccgggctaagagcgttgggagcagaaaaatcagaggagattttgcaagcggtcagggatcttcttcgcgaaaagagttcgttcaagacccaaccggattgggttacagttcttgatggacctcaggaaggcgcatatgaatgggtagttaccatcaattatctgctggggaaattgggaaagacttacgcagacacagttggagtggttgatcttggaggtggatctgtgcagatggcatatgcaattgcagagaaggatgcagtgaaggctcctaaaccatcagagggtgaagattcatatgtgaagaaactgtttcttaaaggaacaacatattatctttatgttcacagcacagctatttgcattatgggttgctggctgctagagcagagatcttaaaagccggcaatggcaaagagggcaatacaaatatggcaatggcaaatttgaagcgtcggcttcaccatctggtgctagttattcaaaatgcagggatgatgtagtgaaagctcttaaagttgaccaagcatgcactcacatgaaatgttcttttggtggcatttggaatggtggtggtggcgctggacagaagaatttgtttgtggcatcatttttcttcgacagggcagctgaggctcaggctggatttgtgaatcccaaggcacctgtggctaaggttaaaccttcagattttgaaaaggctgccaagcgtgcatgtaagttaaacttgaaggacgccgaagctgcctaccctggtgtccaaaaggataacattccatatatctgcatggatctcgtttaccagtacaccttacttgtggatggatttgaccttggtaaagaaagtcccttacagcaacgcgtttgtggaagcagcatggccactgggaagtgccattgaggttgcatcttga

SEQ ID NO: 286 - protein, 455 aa, Oryza sativa
MRRYSALPGGGARPDTLADRLHRYRGVLLVILAPLALVSLVLLLMPRSPASSSAAAGRRWGPLDANKYAVIFDAGSSGSRVHVFRFDANLDLLHIGDQIELFVQLQKKPGLSEYANNPQEAAKSLVSLLEDAKRVVPVELRGQTPVRVGATAGLRALGAEKSEEILQAVRDLLREKSSFKTQPDWVTVLDGPQEGAYEWVVTINYLLGKLGKTYADTVGVVDLGGGSVQMAYAIAEKDAVKAPKPSEGEDSYVKKLFLKGTTYYLYVHHSYLHYGLLAARAEILKAGNGKEGQYKYGNGKFEASASPSGASYSKCRDDVVKALKVDQACTHMKCSFGGIWNGGGGAGQKNLFVASFFFDRAAEAQAGFVNPKAPVAKVKPSDFEKAAKRACKLNLKDAEAAYPGVQKDNIPYICMDLVYQYTLLVDGFDLVKKVPYSNAFVEAAWPLGSAIEVAS

SEQ ID NO: 287 - DNA, 2448 bp, Oryza sativa
  misc_feature (2001)..(2001): r = adenine or guanine
  misc_feature (2217)..(2217): y = cytosine or thymine
atgcaacaaaaggaagccggcgaggaagccgtcgtcgtcgtgggcgccgggatcgccggcctcgccgtggctctcgggctgcacaggaaaggggtgaagtgctcggtgctggagtcgtcgccggagctccgggcgtcggggttcgccttcgcgacgtggacgaacgcgtggcaagcgcttgacaaccttggggtgggcgacaagatcaggaagcttcatctgcatcttcaggagtatgtagaaaaagagaggaacacttgtaggttgcatgtcttctcttcgtctacgggagagataacacgaagagcggatctcacggtgcaggggaaacgaggacccaatgaactgcgctgcgtcaggcgggactggctgctccgagcactagaggaagagctaccaaaaggcaccatccgttactcctccaagatcgttgcaatcgaagaggatggcaacgccaagatcatacaccttgccgacgccgcaattctcagagcaaaggtgctgatcggctgcgacggggtgaattccgttgtggcaaaatggctggggctcacaaagccgtcgtcctcggggcgcttggcgacgagaggcctcgcgcattaccctgatggccatggattggacccaaggttcaagatgttcgtcggccatggcttccgtgctggcgtgatcccctgcaacgagactgatgcctactggttcttcacctggtctccttccgaacacgaaagtaatggcgtcgaggagagcgcggaaaagatgaagcagttcgtgctgaccaagctgaggagctccaagatcccaaccgaggtgctcgaggtcgtcgagaggagcaacataaacgacgtggtcgcgttcgccgctgcgtttccggcccccgctgtcgctcctgctcgcgagcatcagcaaggggaacgcggcggctgcgcggcgctcgaggacggcgtcgtgctggcgagatgcctcggcgacgcccttctcggcggcggcggcgccgccgagagcgagaggatcgaggcgagtctacgtgagtacgctagaatccggcggtggaggagcgtcgagctcgtcgggacagcctacgtcgtcggcatcgtgcagcagagtaacaatgcggtcatcagctttctgcgggacaagtgcatttattctcatctctttcctgcagccaagtcagtttgcattcgcacaaagccagttgcaagcatgcagcaagaacaggcagacggccgggagatcgtcatcgccggcgccggcctcgccgggctcgcagtggccctcggactgcacaggaaaggactgaggagcgtggtgctggagtcgtcgccgacgctgcggacgtccgggttggcgttcatcacatggacgaacgccttccgcgcgcttgatgcccttggggtaggcgacaagatgaggagccagcaccagcagatccagaggttgaatgtcatgtcttcagctactggagaaatagtgcaagaaattgatctgagggcgcaaggcaaacggggaacccatgaggcacgctgcgtgagccgcaccgcgctgctactggcgttggaggaagagctcccaagaggcaccatccgctactcctccaagatcgtctcgatcgaggaagacggcaacgccaagatcctccatctgtctgacggatcgactctcagagcaaaggtgctgatcgggtgcgacgggatcaactcggtggtggcgagatggctggggctcgcgaagccgtcggactcggggcacacggccacgcgcggacgcgccaagtacccggacggccatggcttcgagcccaggtttctgcagttggtcggccagggattccgtgcaggcatggtgccctgcaacgacaccgacgtctactggttcttcacgtggtctccttccccagatgataaggatgtcgacaagagttcagccgcgacgaagcagttcgtgctgacaaagctccggagcacgaacgtgccaccacaggtgctcgaggcggtcgarcggagcgagatgaacgacgtgctcgcggcgccgctgcggttccgatcgccgctgtcgctcccgttcgcgagcatcagcaaggggaacgtgtgcgtcgccggcgacgcgctccacccgacgacgccggacctggcgcagggcgcgtgcacggcgctggaggacgccgtcgtcctggcgaggtgcctcggcgaggcgctgctgctccgtaccggcgaytgcgccgccgaggagagtcaccgggtcgtcgaggccgcgctgcgccggtacgcggacgcccggcggtggaggagtgcgcagctgaccggtgcgtcgtacgcggttgggcagagcgaccaccccgccgtgggcttcctgcgtgacaagctgttgtccggggtgctcgccaagacgctgctcatgatgcccgactacgattgcggcacgctctcgagttccggtgcttgttga

SEQ ID NO: 288 - protein, 813 aa, Oryza sativa
MQQKEAGEEAVVVVGAGIAGLAVALGLHRKGVKCSVLESSPELRASGFAFATWTNAWQALDNLGVGDKIRKLHLHLQEYVEKERNTCRLHVFSSSTGEITRRADLTVQGKRGPNELRCVRRDWLLRALEEELPKGTIRYSSKIVAIEEDGNAKIIHLADAAILRAKVLIGCDGVNSVVAKWLGLTKPSSSGRLATRGLAHYPDGHGLDPRFKMFVGHGFRAGVIPCNETDAYWFFTWSPSEHESNGVEESAEKMKQFVLTKLRSSKIPTEVLEVVERSNINDVVAFAAAFPAPAVAPAREHQQGERGGCAALEDGVVLARCLGDALLGGGGAAESERIEASLREYARIRRWRSVELVGTAYVVGIVQQSNNAVISFLRDKCIYSHLFPAAKSVCIRTKPVASMQQEQADGREIVIAGAGLAGLAVALGLHRKGLRSVVLESSPTLRTSGLAFITWTNAFRALDALGVGDKMRSQHQQIQRLNVMSSATGEIVQEIDLRAQGKRGTHEARCVSRTALLLALEEELPRGTIRYSSKIVSIEEDGNAKILHLSDGSTLRAKVLIGCDGINSVVARWLGLAKPSDSGHTATRGRAKYPDGHGFEPRFLQLVGQGFRAGMVPCNDTDVYWFFTWSPSPDDKDVDKSSAATKQFVLTKLRSTNVPPQVLEAVRSEMNDVLAAPLRFRSPLSLPFASISKGNVCVAGDALHPTTPDLAQGACTALEDAVVLARCLGEALLLRTGCAAEESHRVVEAALRRYADARRWRSAQLTGASYAVGQSDHPAVGFLRDKLLSGVLAKTLLMMPDYDCGTLSSSGAC

SEQ ID NO: 289 - DNA, 1011 bp, Oryza sativa
atggctgatgaaatccagcatctgaccagggccttctcagggctcggtggcctcggcgtggacgagccggcgatggtgtcggcgctggccaagtggcgcaggcagccggagaagctgtccgggttcaggaagagcttcaatggcttcttcaaggatcatggcggcgtcatcgagaagtgcgaggaggagtacatgctccacctcgccgccgagttctcgcgcttgtcaatggagatggagctgattgggttattgtggttgtgtttgttcactgttcagaacctgatggtgatgtgggcgatgcacccgtgggagcgcgacgcgcggctggcgcaccacgtgctccaccaggcgcacccggcggccatcgtcgtggagatcgcttgcacccggacggcggaggagctcctcggcgctcgcaaggcgtaccaggcgctgttccaccactccctcgaggaggacgtcgcctaccgcgccagggacaagccctactgcggcctgctggtcgggctggtgagcgcgtaccggtacgagggcccgagggtgagcgaggagacggcgcgcgcggaggcgaaggcgctcgtcgccgcggtgaagagcgccggccacgcggcggcgaagctggtggagaacgacgacgtcgtcaggatcctcaccacccggagcaagccgcacctcgtcgagaccttcaagcactacaaggaaatccatggccgccacatcgaagaggatcttgggcacgaggagacactgagggaggcggcgctgtgcctggcgacgccggcgaggtacttcagcgaggtggtggcggcggcggtgagcgacggcgccgaccaccacgcgaaggaggcgctgacgcgggtggcggtgacgcgggcggacgtggacatggacgccatccgcgcggcctaccacgagcagttcggcgggaggctggaggacgccgtcgccgggaaggcgcacggctactacagagacgcgctcctctcgctcgtcgccggcggcaagtga

SEQ ID NO: 290 - protein, 336 aa, Oryza sativa
MADEIQHLTRAFSGLGGLGVDEPAMVSALAKWRRQPEKLSGFRKSFNGFFKDHGGVIEKCEEEYMLHLAAEFSRLSMEMELIGLLWLCLFTVQNLMVMWAMHPWERDARLAHHVLHQAHPAAIVVEIACTRTAEELLGARKAYQALFHHSLEEDVAYRARDKPYCGLLVGLVSAYRYEGPRVSEETARAEAKALVAAVKSAGHAAAKLVENDDVVRILTTRSKPHLVETFKHYKEIHGRHIEEDLGHEETLREAALCLATPARYFSEVVAAAVSDGADHHAKEALTRVAVTRADVDMDAIRAAYHEQFGGRLEDAVAGKAHGYYRDALLSLVAGGK

SEQ ID NO: 291 - DNA, 1296 bp, Oryza sativa
atgtcggtgatgctggtgctagaggtggcctacatgagcctcgtcagcctcgtcgccgtcaagctgctgcggcgggtgccggagcggaggcgttcccgatggtgctcgtgcagatccccatgtacaatgagaaggaggtgtacaagctctctattggagctgcatgtgctctcacgtggcctccggaccgtattataatccaagtcttggatgattccactgatccggccattaaggatctagtggagcttgagtgcaaggattgggcgagaaaagaaattaacataaagtatgaaatcagagataacaggaagggatacaaagcaggagccttgaagaagggcatggaacatatctatacccaacagtgcgattttgttgccattttcgatgcagatttccaacctgaatctgatttccttctaaaaacaataccatttcttgtgcataacccaaagattggtctggttcagacacgttgggagtttggtgaactatgatgtttgccttatgacaaggatacaaaagatgtcactggactatcatttcaaagtagagcaggaatcaggctcatctatgcactcattctttgggttcaacgactgctggtgtgtggcgggtatcagctattaacgaagcaggaggttggaaggatcgcacaactgtggaagacatggacttggctgtacgggcaagcctcaagggatggcaattcctgtatgttggtgatataagggttaagagtgaactcccaagtaccttcaaagcctaccgacatcagcagcatagatggacttgtggtgctgccaacctcttcagaaaaatggcaacggaaattgccaaaaacaagtggaaaaaacttcatctactctacagctttttcttcgtaaggagggtcgtcgctcccatcctgaccttcctgttctactgtgttgtgattccgctgtctgtcatggtccctgaagtcagcattcctgtctgggggatggtctacattcccactgccattaccatcatgaacgccatcagaaatcctggaggtccatccatctgatgcctttttggattctattcgagaatgtcatggccatgcaccggatgcgtgcagctctaaccggcttgctcgagaccatgaatgtcaatcagtgggtggttactgaaaagtacctcctggtatgcgcgtcttacgatttggtgctcggggccaagcactactacctgtacatctacctccaggcatttgctttcattgctctgggattcggtttcgctgggacatctaccccctgttcatag

SEQ ID NO: 292 - protein, 431 aa, Oryza sativa
MSVMLVLEVAYMSLVSLVAVKLLRRVPERRRSRWCSQIPMYNEKEVYKLSIGAACALTWPPDRIIIQVLDDSTDPAIKDLVELECKDWARKEINIKYEIRDNRKGYKAGALKKGMEHIYTQQCDFVAIFDADFQPESDFLLKTIPFLVHNPKIGLVQTRWEFGVNYDVCLMTRIQKMSLDYHFKVEQESGSSMHSFFGFNDAGVWRVSAINEAGGWKDRTTVEDMDLAVRASLKGWQFLYVGDIRVKSELPSTFKAYRHQQHRWTCGAANLFRKMATEIAKNKWKKLHLLYSFFFVRRVVAPILTFLFYCVVIPLSVMVPEVSIPVWGMVYIPTAITIMNAIRNPGRSIHLMPFWILFENVMAMHRMRAALTGLLETMNVNQWVVTEKYLLVCASYDLVLGAKHYYLYIYLQAFAFIALGFGFAGTSTPCS

SEQ ID NO: 293 - DNA, 777 bp, Oryza sativa
  misc_feature (154)..(154): r = adenine or guanine
atgttggccatattccagaagcaggtggcgcacgcgccggcggagctgaacagcccgcggagcagcgcggcgaagcccaagaaccccgacgagatcctcagggacttccacgccctccaccccatcgaggccttctccacctccttcggcggcrgcgccgccttcgcctgcgtcgccggccacgcccgcaatggcctctctggctacgagaggatgttctgtgggctggatgacatctactgcgtgttcatggggaggctggacaacctgagcagcctgatccggcagtacgggctgtgcagccgctccaccaacgaggcgctgctcgtcatcgaggcctaccgcaccctccgcgaccgcggcccctaccccgccgaccaggtcgtcaaggatctctccggctccttcgccttcgtcgtcttcgacaacaagtccggcgccgtcttcgccgccctgagtacggatggggaggtgccgttgtattgggggatcgcggcggatgggtcggtggtgatctgcgacgagagggagatcgtgaagggagggtgcggcaagtcgtacgcgccgttcccggtggggtgcatgttccacagcgagggggggctcaagagcttcgagcacccgatgaaccggctgaaggcgatgccgcgggtggacagcgagggcgtcatgtgcggcgccaccttcaaggtcgacaccttcaccaagatcaactccatgccccgcgtcggcagcgccaccaactgggccgccacctgggacgacgctgccgcctga

SEQ ID NO: 294 - protein, 258 aa, Oryza sativa
MLAIFQKQVAHAPAELNSPRSSAAKPKNPDEILRDFHALHPIEAFSTSFGGRAAFACVAGHARNGLSGYERMFCGLDDIYCVFMGRLDNLSSLIRQYGLCSRSTNEALLVIEAYRTLRDRGPYPADQVVKDLSGSFAFVVFDNKSGAVFAALSTDGEVPLYWGIAADGSVVICDEREIVKGGCGKSYAPFPVGCMFHSEGGLKSFEHPMNRLKAMPRVDSEGVMCGATFKVDTFTKINSMPRVGSATNWAATWDDAAA

SEQ ID NO: 295 - DNA, 405 bp, Oryza sativa
atggagtacagcactcttccgggcaaacagcaggcgaaggaattgattccttggctccggccgccttcgggcttcgattcgactgcttgcctcgacgacaccatcgccgatgcaggccgcgcggcgacagcgcaagcgtggacggagcccctccccaagggcgccttcacggcgaccacgtacaggtcggcggcggccgcggccaccggcggcgaggaggagagccggcacccgccgccgccggcgaggacggagctccggtcgaccgaggacgagcgcgggctgcccgtgaagaggctggaggacaaggtcgacgacgccgccgggaagggcggcccggtgttcggcgccggcgaggacgacggcaagccagacctcggcgtcaccggcaccggcggcggctga

SEQ ID NO: 296 - protein, 134 aa, Oryza sativa
MEYSTLPGKQQAKELIPWLRPPSGFDSTACLDDTIADAGRAATAQAWTEPLPKGAFTATTYRSAAAAATGGEEESRHPPPPARTELRSTEDERGLPVKRLEDKVDDAAGKGGPVFGAGEDDGKPDLGVTGTGGG

SEQ ID NO: 297 - DNA, 1605 bp, Oryza sativa
atggccgcggcgcctatgagcttcgcttttacgctgctcgcggcttgcatttccttcttgcaccacgcgccggccgccgccgcagccgctccggcgaaccagaccgccggctttctcgactgcctcgccgcgagcctccctgccggcgtcgtctacacgcacgcgtcccggtcgtaccagtccgtcctcgagtcctccatcaagaacctcctcttcgacacgccggccaccccgacgccggtcgcggtcgtcgaggccaccgacgcctcgcacgtccaggccgccgtgcgctgcggcttctgccatggcgtctccgtccgctcccgcagcggcgggcatgactacgagggcctgtcctaccgctccctcgacgcggcccgcgccttcgccgtcgtcgacatggcgggcggcgcgctccgcgcggtccgcgtcgacgtcctcggccgggcggcttgggtcggctccggcgcgacgctcggcgaggtgtactacgccatcgccaacaagacctcccgcctcgggttccccggcagcgtcggcccgacggtcggcgtcggcgggttcctcagcggcggcggcttcggcctgatgctgcggaagcacggcctcgcctccgaccacgtcctcgacgccaccatggtggaggccaaggggaggctcctcgacagggccgccatgggcgaggacctcttctgggccatccggggcggcggcggcggcaacttcgggatcgtcctgtcctggaagctccggctcgtccccgttccggccaccgtcacggtgttcaccgtccaccgctcaaggaaccagtccgccaccgacctcctcgccaagtggcagcgcgtggcgccgtccctccccagcgacgccttcctccgcgtcgtcgtgcagaaccagaacgcgcagttcgagtccctgtacctcggcacgcgcgccggcctcgtcgccgccatggccgacgccttcccggagctcaacgtgacggcgagcgactgcatcgagatgacgtgggtccagtccgtgctctacttcgcgttctacggcacggggaagccgccggagatgctcctggacaggggcaccggcaggccggacaggtacttcaaggccaagtccgactacgtccaagaacccatgcccagccaggtctgggagaccacctggagctggctcctcaaggacggcgccggactgctcatcctcgacccctacggcggcgagatggctcgcgtcgcgccggcggcgacgccgttcccgcaccggcaggcgctctacaacatccagtactacgggttctggtcggagagcggggaggcggcggcggcgaagcacatgggctggatcagaggggtgtacggggagatggagccgtacgtgtccaagaaccccaggggcgcctacgtcaactacagggacctcgacctcggcgtgaacgacgatggcgacggcggcggcggcgtggcgagggcgaggtatgagaaggcgacggtttgggggagagcgtacttcaaggccaactttgagcggctcgcggcggtgaaggccaaggtggatcctgacaactacttcaagaacgagcagagcattccaccacttccgagttag

SEQ ID NO: 298 - protein, 534 aa, Oryza sativa
MAAAPMSFAFTLLAACISFLHHAPAAAAAAPANQTAGFLDCLAASLPAGVVYTHASRSYQSVLESSIKNLLFDTPATPTPVAVVEATDASHVQAAVRCGFCHGVSVRSRSGGHDYEGLSYRSLDAARAFAVVDMAGGALRAVRVDVLGRAAWVGSGATLGEVYYAIANKTSRLGFPGSVGPTVGVGGFLSGGGFGLMLRKHGLASDHVLDATMVEAKGRLLDRAAMGEDLFWAIRGGGGGNFGIVLSWKLRLVPVPATVTVFTVHRSRNQSATDLLAKWQRVAPSLPSDAFLRVVVQNQNAQFESLYLGTRAGLVAAMADAFPELNVTASDCIEMTWVQSVLYFAFYGTGKPPEMLLDRGTGRPDRYFKAKSDYVQEPMPSQVWETTWSWLLKDGAGLLILDPYGGEMARVAPAATPFPHRQALYNIQYYGFWSESGEAAAAKHMGWIRGVYGEMEPYVSKNPRGAYVNYRDLDLGVNDDGDGGGGVARARYEKATVWGRAYFKANFERLAAVKAKVDPDNYFKNEQSIPPLPS

SEQ ID NO: 299 - DNA, 716 bp, Oryza sativa
  misc_feature (45)..(45): s = guanine or cytosine
  misc_feature (611)..(611): r = adenine or guanine
atggacgcgtctccgagctcctcgtcgtcgtctcctgtggcgccsgaagtggtgcaatgggcccgcggcgccgacggctttggctcggcggcgatcggcttcgcgtgcagggtgctctgcgccgtcgccacctgcgtcttcgccgcaggcagtggggtcggtggtcggggcggtgaccgggagcgcgatcgggctggcgacggagagcggaatgctgcgcggcgccggcatcggcgccatctccggcgccgtcttctccatcgaggtcgccgagtcgtcgcgcgacctctggcactccagcgactccgccgtctggtgcctcgtctacatgggtcgacatcatctccagcctcctgagtggaaggctggtgcgggagaaggtgggtcccgcggttcagagcgcggttcagagtcagcagataagcgccatcagctcgccgttcgccgagaccagcgacctgttcgagaccggcggcaccaagggtttaccggcggacacgctccgccggctgccggcgatcaagatcaccggcgacaacgccgtcgactccgccggcgagcccatctgctgctccgtgtgcctccagttgcaggatttccgcgtaggtgaratggcaagaaggctaccaagctgccggcacgtgtttcacgtgccgtgcatcgactgctggctggtgaggcacggctcctgcccgctgtgccggcgagacatctga

SEQ ID NO: 300 - protein, 200 aa, Oryza sativa
  X_region (15)..(15): Xaa = any naturally occuring amino acid
WTRLRAPRRRLLWRXKWCNGPAAPTALARRRSASRAGCSAPSPPASSPQAVGSVVGAVTGSAIGLATESECCAAPASAPSPAPSSPSRSPSRRATSGTPATPPSGASSTWVDIISSLLSGRLVREKVGPAVQSAVQSQQISAISSPFAETSTCSRPAAPRVYRRTRSAGCRRSRSPATTPSTPPASPSAAPCASSCRISA

SEQ ID NO: 301 - DNA, 3597 bp, Oryza sativa
  misc_feature (560)..(560): r = adenine or guanine
atgtcgtccgcctcctccacccctccctcccccacctctgccgccctggacacagcggctgatgccgtcgcgaaggctgtccgcgccgcgttccaggtgctgcctggcatggagatcgaccccacgatggcgaacaccgtcgtcgactctgctgccacccgggcgtccgacgccgctcgcaacgccctctcccccgtgctgagcaccctcctgtccggcactcccgcgacgaccggcgctcccgcgactactggcgcccccgccggcgcaggcatcgccgcgacctccgtggccgccacccacggcgtggcgcctgcgaccacggcgcctcttcccggcaccatgccggctgacctcgccgccctcttcgcctctgcgcgcctcgcgcatggcgtccacacgccggagccgaccgtccccgacttctcgcgcccacccgccactcctctcgacgacgccgccttggcagcactccacgctcaagccgtcagcgtcctcaacatcaaggcactcgttcccgtgactctcgacgtcgctgccaccaactacacacgatggcrtggcctcttcctcgtggcactcggcaagtacgccctcacggatcacgtcctctccgacgcgtaccacttcgaccgcgccgattgggtgcaaatggattgtgtcgtcctcgcttggctcttcggcaccatctccttcgaccttctccaagacgtccttgcgactgacactacagctcgtctcgtttggcgcggcctcgagtatcaattccttggcaacagcgagcaacgtgccctcaacctcacgacggaattccacacgttccgacaaggcgacctctccgtcgacgagtactgccgcaagatgaagaccttcgctgacagcctcggcgacgtcggcgagcccgtccgcgaccgcaccctcgtcctcaacactttgaacggtttgtccgagaagttcaataacctccggtctctagttcccatgcagcggccattcccgaccttcgccgagcttcgctccatgcttcgcctggaagaactctccaagccgaaccacgccgcgtctgcttcttccgccgtcttcctcgccacgggcagcacgaccaacggcggcaagggcgccaatccagcgcacggcaccggctatggtgccggcaaccaaggcggtggcggcaagggcaacagcaaccggcgtcgccgcggcggcaacggcggcggcggtggcggtggtggtggcggcggtaacagcaaccaaggaggcggcagcaccgttccagcacaggcgcaaggtgcccagtggagggctggctcccagtggccttccccacaaaatccatgggccggcaccatccacatgtggccgggcccgttgggtcgtggtgtgcttggcccaaggccggcaccctccccctttgctggtgctgctttggctgggccgagcggcggcccgctgcctggccaagtctacccggcgcccgtcccctaccagacagcagctggcctggggcagcaggcccagctcggtggcgtgggccagttcggcccatcacagccacccacttcagtggctcttcaacaacctttgggctggtttggtggtgctccttcgcagtgggaccaagcgtcccttgccggctccttcaacaccacgacgctacaccaacccgccacaaatgactggccggtctcaacacctggtgggccgtcctccccagacagccggctcgggccgccttcccccacccctgcactgattgggccggcgtcgacttcacctggaccgccttcagctgggccggctccatcagcctccacctgcccggcctcttcgacctgggagaccgtggctcggccgcccactcctcccggccttcctcgactggacggcccgcatctcccgccagctccacatgtcccgcgccgccttcgatcagttcgtgctaccggcgcaccaactccactgtccggcctggaaatctcaccggttgtcaacgaccacgtcatgacaacccgcgccaagtccggtcaccacaagcctgttcatcggcttaatcttcatgccgccccgctgtctctggtgcccaagacataccgggcggcccttgccgatccgctctggcgcgccgccatggaagaagagtacaatgctctcctcgccaaccgcacctgggatcttgttccgcgtcctgccggcgtgaacgtcgtcaccggcaagtggatcttcaagcacaagtttcatgctgacggctccctcgaccggtacaaggctcgttgggttcttcgcggcttcacccaacgccccggcgtcgacttcgatgagactttcagcccggtcgtcaagccggccactgtccgcactgtcctcagcctcgccgtttctcgcgactggccggtgcaccaactcgacgtcaagaacgccttcctccacggcacgcttcaggagactgtctactgcacccagccgcccggcttcgtcgactccgccaagcccgacatggtgtgctgcctcaacaagtccctctacggcctcaagcaggccccgcgcgcatggtacagccgcttcaccacctttctacagtccatcgggtttgttgaggccaagtccgacacgtccttgttcatccttcaccgagggaacgacaccgtctaccttctgctctacgtcgacgacatcgtgctgacggcttcctcacgcacgctccttcattggaccatctccgcccttcagggcgagttttccatgaaggacctcggcgccctccaccacttcctcggcgtcagcgtcaccaggaattcagctggcctcgtgctcagccagcggcagtactgcattgacatcctcgagcgtgcaggcatggcagattgcaagccctgtaacactcctgtcgacaccactgccaagctttcctcctccgacggccctcctgtagcggatcccacagacttcaggagcctcgccggtgcgctacagtacctcaccttcacccggcccgacatctcctacgctgtacagcaagtctgccttcacatgcatgaccctcgcgagcctcacctggcagccctcaagcggatcctccactacatccgtggctctgtggacctaggactccacattcagcggtcctccgcctgcgacctcgccgtctactccgacgccgactgggccggctgccctgacactcgtcgctccacatctggctacgccgtcttccttggagacaacttggtgtcatggtcctccaagcgccagcacacggtctcccgctccagtgcagaggccgagtaccgcgccgttgccaatgcggtcgccgaggtcacatggctgcgccagctactccaggagctacattctccgccgtcgcgggctacactggtctactgcgacaatgtcagtgccgtctacctctcctccaacccggtgcagcatcagcgtaccaagcatgttgagatcgaccttcacttcgttcgggaacgtgtcgcggtcggcgccgtccgtgttcttcatgttcccacaacatcgcagtacgccgacatcttcaccaaggggcttcctacaccggtcttcaccgagtttcgctccagtctcaacgtctgctag

SEQ ID NO: 302 - protein, 1198 aa, Oryza sativa
MSSASSTPPSPTSAALDTAADAVAKAVRAAFQVLPGMEIDPTMANTVVDSAATRASDAARNALSPVLSTLLSGTPATTGAPATTGAPAGAGIAATSVAATHGVAPATTAPLPGTMPADLAALFASARLAHGVHTPEPTVPDFSRPPATPLDDAALAALHAQAVSVLNIKALVPVTLDVAATNYTRWRGLFLVALGKYALTDHVLSDAYHFDRADWVQMDCVVLAWLFGTISFDLLQDVLATDTTARLVWRGLEYQFLGNSEQRALNLTTEFHTFRQGDLSVDEYCRKMKTFADSLGDVGEPVRDRTLVLNTLNGLSEKFNNLRSLVPMQRPFPTFAELRSMLRLEELSKPNHAASASSAVFLATGSTTNGGKGANPAHGTGYGAGNQGGGGKGNSNRRRRGGNGGGGGGGGGGGNSNQGGGSTVPAQAQGAQWRAGSQWPSPQNPWAGTIHMWPGPLGRGVLGPRPAPSPFAGAALAGPSGGPLPGQVYPAPVPYQTAAGLGQQAQLGGVGQFGPSQPPTSVALQQPLGWFGGAPSQWDQASLAGSFNTTTLHQPATNDWPVSTPGGPSSPDSRLGPPSPTPALIGPASTSPGPPSAGPAPSASTCPASSTWETVARPPTPPGLPRLDGPHLPPAPHVPRRLRSVRATGAPTPLSGLEISPVVNDHVMTTRAKSGHHKPVHRLNLHAAPLSLVPKTYRAALADPLWRAAMEEEYNALLANRTWDLVPRPAGVNVVTGKWIFKHKFHADGSLDRYKARWVLRGFTQRPGVDFDETFSPVVKPATVRTVLSLAVSRDWPVHQLDVKNAFLHGTLQETVYCTQPPGFVDSAKPDMVCCLNKSLYGLKQAPRAWYSRFTTFLQSIGFVEAKSDTSLFILHRGNDTVYLLLYVDDIVLTASSRTLLHWTISALQGEFSMKDLGALHHFLGVSVTRNSAGLVLSQRQYCIDILERAGMADCKPCNTPVDTTAKLSSSDGPPVADPTDFRSLAGALQYLTFTRPDISYAVQQVCLHMHDPREPHLAALKRILHYIRGSVDLGLHIQRSSACDLAVYSDADWAGCPDTRRSTSGYAVFLGDNLVSWSSKRQHTVSRSSAEAEYRAVANAVAEVTWLRQLLQELHSPPSRATLVYCDNVSAVYLSSNPVQHQRTKHVEIDLHFVRERVAVGAVRVLHVPTTSQYADIFTKGLPTPVFTEFRSSLNVC

SEQ ID NO: 303 - DNA, 669 bp, Oryza sativa
  misc_feature (18)..(18): m = adenine or cytosine
  misc_feature (20)..(20): m = adenine or cytosine
  misc_feature (27)..(27): r = adenine or guanine
atgaggaagaagatagamcmagagaarggggggggggaaataaggaagtggaaagctaggagaagggtgatgaagaacaatgaaattgatcagttcatagcatggggaggtgagggtaagaccaaaatggagcggtgctacgctgctacgccgattcttccaggccttcatgctaactctccactcagttctcacacacaacacaccctctctagtactggttttgagaaatttatcgttcgagctgtctctgacacacgcacaacccggaagatgggcaataataatccaaggaagacccggagaaactggaagaaagaggttcaaattgatgctggtttgttggttgtgtgtgttgttgtgtctgtattaattatacccggcgctgccgaactcgtagagcttgccgcggctggagaagatgatgagcgcgacctcggcgtcgcagagaacggacagctcgtaggccttcttgaggaggccgttgcggcgcttggagaaggtgacctgcctgttgatcttgttctcgatgcgcttcagctcaactcttcccctccccatctcgcccgatcgatcgaacgattcctcagctcagcaccgatcagcaagcacaggctagctagctcctcctccaccaccaccaccactgcctctcttcttgcttgctaa

SEQ ID NO: 304 - protein, 222 aa, Oryza sativa
MRKKIDPENGGGEIRKWKARRRVMKNNEIDQFIAWGGEGKTKMERCYAATPILPGLHANSPLSSHTQHTLSSTGFEKFIVRAVSDTRTTRKMGNNNPRKTRRNWKKEVQIDAGLLVVCVVVSVLIIPGAAELVELAAAGEDDERDLGVAENGQLVGLLEEAVAALGEGDLPVDLVLDALQLNSSPPHLARSIERFLSSAPISKHRLASSSSTTTTTASLLAC

SEQ ID NO: 305 - DNA, 1110 bp, Oryza sativa
  misc_feature (707)..(707): k = guanine or thymine
  misc_feature (1014)..(1014): m = adenine or cytosine
atggacgtgcggtacgaggtggtgagcgacggcctccccgtggggttcgaccggtcgctgaaccacgacgacttcatggggtcgctgctccacgcgttcggcgcgcacgtcgaggcgctgctccgccgcgtcgtcgtcgacgcggcggcgacgttcctcgtcgctgacaccttcttcgtctggccggcgacgctctccaagaagctcgggatcccctacgtctccttctggaccgagccggcgctcatcttcaacctctactaccacatcaacctcctcaccgagcacggtcacttccgttgcaacgagccgaggaaggacacgatcacgtacgtgccgggggtggaggcgatcgagccgggggagctgatgtcgtacctgcaggacacggacacgaccacggtggtgcaccgcatcatcttcagggcgttcgaggaggcccgcggcgccgactacgtggtgtgcaacacggtggaggagctggagccgtccaccatcgccgcgctccgccgcgagcggccgttctacgccgtcggccccatcctccccgccggcttcgcccgcagcgccgtcgccacctccatgtgggccgagtccgactgctcccggtggctcgccgcgcagccgccgcgctccgtgctctacgtctccttcggcagctacgcccacgtcacgcgccgcggagctccacgagatcgcccgcggcktgctcgccagcggcgcccggtggaggtgctcgcccaccccgccgtcgccgccttcctcacgcactgcggctggaactccatcctggagagcgcgtgggccggggtgccgatgctgtgcttcccgctgctcaccgaccagttcaccaaccgccgcctcgtcgtgcgggagtggcgcgccggcgtggccgtcggcgaccgcggcgccgtggacgccggcgaggtgagggcgaggatcgagggggtgatgcgcggggaggaaggggaggtgctccgggagcaggtgggcaagatgcgggccacgctgcamgccgccgtcgcgcccggcggctcgtcgcgccgcggcttcgacgagctcgtcgacgagctgaagcgccgctgcggcggcggcggcggccgccattga

SEQ ID NO: 306 - protein, 369 aa, Oryza sativa
MDVRYEVVSDGLPVGFDRSLNHDDFMGSLLHAFGAHVEALLRRVVVDAAATFLVADTFFVWPATLSKKLGIPYVSFWTEPALIFNLYYHINLLTEHGHFRCNEPRKDTITYVPGVEAIEPGELMSYLQDTDTTTVVHRIIFRAFEEARGADYVVCNTVEELEPSTIAALRRERPFYAVGPILPAGFARSAVATSMWAESDCSRWLAAQPPRSVLYVSFGSYAHVTRRGAPRDRPRLARQRRPVEVLAHPAVAAFLTHCGWNSILESAWAGVPMLCFPLLTDQFTNRRLVVREWRAGVAVGDRGAVDAGEVRARIEGVMRGEEGEVLREQVGKMRATLQAAVAPGGSSRRGFDELVDELKRRCGGGGGRH

SEQ ID NO: 307 - DNA, 1072 bp, Oryza sativa
  misc_feature (925)..(925): k = guanine or thymine
atggccttgagaagtaatggagcattggtgaagtcactgagcttcaaagaatgggaaggaggagcttgatgctgcagcagtgaaggttcagaaggtgtacaagagctaccggacgcggcgaaacctcgccgattgcgcggtcgtcgtcgaggagctatggagctctatatcattcttcaatggcgaaaagcccgaaaccgcggcgtcgcggtgggcaagagcaagaacaagagcagccaaggttggaaaggggttatcgaagaacgggaaggctcagaagctggcattgcagcactggctcgaagctattgatccgaggcatcgatatggccacaatttgcatatttattatggtgtctggtccaggagtgagagtacagagccattcttttattgttggacattggggagggcaaagaagtaaatcttgacaggtgtcctaggaacaagcttcagagccagtgcgtcaagtaccttggaccaagagaggcaggagtatgaggttgttgtggagagtggcaggcttgtttacaaacagtctggagtttttgtccacacttcagatgattccaagtggatctttgtcctcagcacaaccaaggcattgtatgttggccagaagaagaaagggtcatttcagcactccagctttctggctggtggagcaatcacatctgctgggagattagtggtcaaagacggaatcctcaagcttcaggcaatctggccttacagtggtcactacctcccaaccgaggagaatttcagagagttcatcagctaccttcaggagaacggcgtcgaccttgccgatgtcaaggggacggggccgaggatccggtgcgtgcgcgactacccgcaggacctgcagtcgagggcgctggagcacgtcaacctgtcgccgcgcctcgccgccgccggggtkgcgccggcgacgaggaagagggacccggtgccgtcgccgcggccgagccccgggatgatactgtcgccgcggctggcctccgtgggcttccggccgccggtggtggcgctcacgctgccggacttcaagaggagcagattgcagtga

SEQ ID NO: 308 - protein, 84 aa, Oryza sativa
  X_region (7)..(7): Xaa = any naturally occuring amino acid
  X_region (12)..(12): Xaa = any naturally occuring amino acid
  X_region (49)..(49): Xaa = any naturally occuring amino acid
  X_region (60)..(60): Xaa = any naturally occuring amino acid
TAICSSXSPAAXAPPPAAGSPRRPAAATVSSRGSAAATAPGPSSSSPAXPRRRRGAATGXRAPAPSTAGPAGSRARTGSSAPSP

SEQ ID NO: 309 - DNA, 639 bp, Oryza sativa
atgagggttccagtgcaacaacttgcagagaagacaacgaccgagcagggcagcagccagcatcacccactgattagccgatcgatcagcgtgtcatcccaggttggctgtactgttaaacttcctgttaccgaggctcatgtcgaagccgcgcttcttgagctcgcggtactcctggcagagggcgcagggctcgcaccacaagtggacgaggcagtcggggcagggcgtctcctgcaggccgtactgggaccgcagcttggagcggtagatgcaggagtagatacagctgcagcccgtgacgagaaacaccagcgcgtacagcgacccgctcgtcccgcacgacgacgacccccggtcgacgatctccgcgatctgcccgaacgtgatgcacgggcacaaccacgtcataaaacctgcgcccgacaacaatcgatcagcacacacttgctgctgtcgtcgaagcagtcaaagaggtcggtggaccatgggacgggggcggcctggtcctgcatggcgaagggtggtggtggtggtggcgcctccaccgtcctcctccggcttctgagtatatatatgctggcccgacgtacgggggcgccttcgtcgatccctcactctccggcccgccgagggtga

SEQ ID NO: 310 - protein, 212 aa, Oryza sativa
MRVPVQQLAEKTTTEQGSSQHHPLISRSISVSSQVGCTVKLPVTEAHVEAALLELAVLLAEGAGLAPQVDEAVGAGRLLQAVLGPQLGAVDAGVDTAAARDEKHQRVQRPARPARRRPPVDDLRDLPERDARAQPRHKTCARQQSISTHLLLSSKQSKRSVDHGTGAAWSCMAKGGGGGGASTVLLRLLSIYMLARRTGAPSSIPHSPARRG

SEQ ID NO: 311 - DNA, 3453 bp, Oryza sativa
atggcgcgctctgagcgatcgagtacgtatactggaccagtccagatcattggctgccttgtcgtttttagccgcctaataagggtttgtacactggtaaaacgtcggtcaattacaagcgaccattgtttctgctgttgccactcgcaaagtcgcaagcatgagatggctggaggacaggaaaaaagcccccacgcggccaccaccaccagcggcctggcctgcctggctggccagtctctcccacctaactacagtagtatggtcgctgaggcggggaagggaggacaggagatggggcggcgtggaggaggaggacgagcgggaggcgcgtggattggtggctgtgtacttgcgctcgccgccaccttggtcgtctgcgtgctcgtgatccgtggagctggaggactaaatgtaaaaccacctgcagcaactagcagacgtgttaacgtacagcaggaactatatgcaccaagcccaacgatcagccacagaggtcttgctattcctccacttccaacaacttcacccccagttttcccacctcccatcagatcttatcctccacttcctgcaaataagccataccccaatagaccagcagtgtctccagcatcaataatccatcccaccaaccatgggaaggcccatggagttccaattgcagcacattcaaaagaaaggcatcatcattccatgcttgtaaataatacacatggaaatacccatgcaggtccagttgtggcacctccaaagggaaggcatcaccattctttgcctgtaaataatacccgtgtaaaaggacctgcctattctccttcaaattctcccagtatccatagaaaacatggcattccagttgctgcacctccaaagcaacattccagcaatttaccaccttcacatcataggccccacaaaggatcctttcctgtcataagccctactccacataaagctgataatgcttctgcgacgaaacatggacgttctggcttacaccatagtcctgcacctgcacctgtaggcttgcctccatctgaaggaaatgcacgaggaaatcctgcgtatgcaccacgtcatccccatgaatatcactcgccttcaaattctccagattgcatggcgttaaattgtcaagatcctctgaccaatagtctccctggaactacatgtctttgtgtgtggccaataaaagttgagcttcgtttaggtatagctttgtacacattctttgcattggtatcagaacttgcacaagatattgcatctggagtgctcatgaaacaaagtcaagttcgtgtaatgggagcaaatgctgcaactgaggacccagagaaaacagttgtccttattgatcttgtgccactgggagaaaaatttgacaaggcaacagcacttttagtatttgaaaggttttggcacaagcaggtcaacataaactctatgcattttggaaactatgatgtgttatatgttacctaccaaggtcctgggtctgcagttgttgggagcaggctaggaagcagacctatttcagcatctccatctttcagctcaagcatagtgacatataaagggacagcgaaaacatttagcttgattgagatggaaagagctacacaaagatttgacaactccagaattattggcgagggtggttttggacgtgtttatgaaggtattcttgaggatggagaacgggttgctgtcaaaattcttaagagggacgaccagcaagttacacgggaatttttagctgagcttgagatgcttagccgattgcatcacagaaacctggttaagttgataggtatatgcacagaagaacatatccggtgtcttgtgtatgagcttgttccaaatggtagtgtggaatctcacttgcacggatcagataagggaactgctccacttgattgggatgctaggcttaaaattgcacttggtgctgcacgtgctcttgcttatttgcatgaagattctagtccccgtgtcatacaccgtgacttcaagtcaagtaacatcttattggaacatgacttcacccccaaggtgtcagactttggcctagcaagaacagccataggtgaggggaatgagcatatttcaactcgtgttatgggaactttcgggtatgttgctcctgaatacgcaatgactgggcatcttctagtaaagagtgatgtctacagctatggtgtcgtcctccttgagcttcttaccggaaggaaaccggtggatattttgagacctccagggcaagaaaatttagttgcatgggcttgtccttttcttactagcagagatggcttggaaacaataattgatccatcacttggaaatagcatcctattcgatagcattgcaaaagtagcagctattgcttctatgtgcgtgcagcctgaggtggatcagcgcccatttatgggtgaagttgttcaagctttgaagttggtatgcgatgaaggcagcgagttcaatgaatcaggaagtttcagccaagatttacatattcaggattctgggattataagtagagcaagcctggatgtggacgtagaacctgttgtatctgctgagctgttcaatgcatcagcacattatgacactcttgatgcatctggttcttttcgacgatattcaagttcaggtcctcttaggtggaaagtaaagccggttcatcaactgcggttcatcaactgtaaatgttcatgtaccttcccaagtgtagccattcctttcgcatggaaggagggccgggatatattagtagccttcctcaacaagtacgtgtgccccccaaacctggctggaccaatgttggagaagacaaggagttggtttacttctatagctatggaaattttggcctatggtgctagttttggccctaaactggagttcaagattcagaattcagttattagcagaataaccttatttgtagttggtgagcttggaaccccaatgttcagtaagcagcctctgaggaaggttcctttctcaacgccttccaaggcagcgtgtatcaatgatgatatgaaagtgaaacgttgctgtgttgaagatgcaggccaatgtagtgggagaggtactcgttgtagtacaacgttaattaattcccgttgtaccaccaagcacgaggacaaacgcaagacgagctcgctcggtcgctcccctcgcccctcgacacccaccacaccacgacgactcctcgtcgtgcgaggtgcgcacgttgcacgcaaacaaacgttggtggaccatcaacgggacacgtgctgtggcgacccgatggaggcgagcgttgcgtcgttttctcttcgtaattgcgtgcgaatttatttgcggagcccccgagcctctgccacaggccacagtggaaccgctaggaacaaggaacactggcgatctgtttatgtgactaactttgccaaaccaaattttaggtaa

SEQ ID NO: 312 - protein, 1150 aa, Oryza sativa
MARSERSSTYTGPVQIIGCLVVFSRLIRVCTLVKRRSITSDHCFCCCHSQSRKHEMAGGQEKSPHAATTTSGLACLAGQSLPPNYSSMVAEAGKGGQEMGRRGGGGRAGGAWIGGCVLALAATLVVCVLVIRGAGGLNVKPPAATSRRVNVQQELYAPSPTISHRGLAIPPLPTTSPPVFPPPIRSYPPLPANKPYPNRPAVSPASIIHPTNHGKAHGVPIAAHSKERHHHSMLVNNTHGNTHAGPVVAPPKGRHHHSLPVNNTRVKGPAYSPSNSPSIHRKHGIPVAAPPKQHSSNLPPSHHRPHKGSFPVISPTPHKADNASATKHGRSGLHHSPAPAPVGLPPSEGNARGNPAYAPRHPHEYHSPSNSPDCMALNCQDPLTNSLPGTTCLCVWPIKVELRLGIALYTFFALVSELAQDIASGVLMKQSQVRVMGANAATEDPEKTVVLIDLVPLGEKFDKATALLVFERFWHKQVNINSMHFGNYDVLYVTYQGPGSAVVGSRLGSRPISASPSFSSSIVTYKGTAKTFSLIEMERATQRFDNSRIIGEGGFGRVYEGILEDGERVAVKILKRDDQQVTREFLAELEMLSRLHHRNLVKLIGICTEEHIRCLVYELVPNGSVESHLHGSDKGTAPLDWDARLKIALGAARALAYLHEDSSPRVIHRDFKSSNILLEHDFTPKVSDFGLARTAIGEGNEHISTRVMGTFGYVAPEYAMTGHLLVKSDVYSYGVVLLELLTGRKPVDILRPPGQENLVAWACPFLTSRDGLETIIDPSLGNSILFDSIAKVAAIASMCVQPEVDQRPFMGEVVQALKLVCDEGSEFNESGSFSQDLHIQDSGIISRASLDVDVEPVVSAELFNASAHYDTLDASGSFRRYSSSGPLRWKVKPVHQLRFINCKCSCTFPSVAIPFAWKEGRDILVAFLNKYVCPPNLAGPMLEKTRSWFTSIAMEILAYGASFGPKLEFKIQNSVISRITLFVVGELGTPMFSKQPLRKVPFSTPSKAACINDDMKVKRCCVEDAGQCSGRGTRCSTTLINSRCTTKHEDKRKTSSLGRSPRPSTPTTPRRLLVVRGAHVARKQTLVDHQRDTCCGDPMEASVASFSLRNCVRIYLRSPRASATGHSGTARNKEHWRSVYVTNFAKPNFR

SEQ ID NO: 313 - DNA, 951 bp, Oryza sativa
  misc_feature (456)..(456): m = adenine or cytosine
  misc_feature (510)..(510): r = adenine or guanine
  misc_feature (512)..(512): m = adenine or cytosine
  misc_feature (514)..(514): r = adenine or guanine
  misc_feature (516)..(516): m = adenine or cytosine
  misc_feature (520)..(521): s = guanine or cytosine
  misc_feature (522)..(522): r = adenine or guanine
  misc_feature (523)..(523): w = adenine or thymine
  misc_feature (528)..(528): k = guanine or thymine
  misc_feature (564)..(564): m = adenine or cytosine
  misc_feature (710)..(710): m = adenine or cytosine
  misc_feature (728)..(728): m = adenine or cytosine
atggtggcctgcagctgcgccacagccatagccagaggaggaggaggaggaggtctgaagctcaacttctactcggagtcggagaggtgcccgagggcggaggaggtggtgagggaggaggtgcggaggctgtacgaggagcacggcaacacggcggtgtcgtggttgagggcactcttccacgactgcatggtctactcctgcgacgcctccctgctgctccacaccaccaccaccacaggcgtctccgagcagtcctcccaccgcagcttcggcatgcgcaacttcaagtacatcaccgccatcaaggccgccgtcgagcgtgagtgccctgccaccgtctcctgcgccgacatcctcgccctggccgcccgcgacggcgtggccatgctgggtgggccctcggtggccatgcggacggggcggcgcgacagcagggagagctactacggcccmaaccacaacgacagcgttttcaccgtgctgtcgagtttgcggccatcggggtgramcrgmggassrwccgtkgcgctgctgggcgcgcaatcggtggggcgcgtccamtgcttcaacctggtggggaggctgtacccgcaggtggacggcagcatggaggcggcgtacggggagtacctgcgggggaggtgcccgacggctgcggcgacggaggacacgagagaggtggtgtacgcgcgcaacgaccgcgtcamgcccatgctcatcgacamcatgtactaccgcaacctgctcgccgggcgggggctcctcctggtggaccagcagctggcctccgacgcccgcacggcgccctacgtccgccggatggccgccgacaacgactacttccaccagcgcttcgccgcagcgcttctcaccatgtccgagaacgcgccgctcaccggcgcacagggggaggtcagaaaagactgcaggttcgtcaactctagctaa

SEQ ID NO: 314 - protein, 316 aa, Oryza sativa
  X_region (171)..(172): Xaa = any naturally occuring amino acid
  X_region (174)..(175): Xaa = any naturally occuring amino acid
  X_region (188)..(188): Xaa = any naturally occuring amino acid
  X_region (237)..(237): Xaa = any naturally occuring amino acid
  X_region (243)..(243): Xaa = any naturally occuring amino acid
MVACSCATAIARGGGGGGLKLNFYSESERCPRAEEVVREEVRRLYEEHGNTAVSWLRALFHDCMVYSCDASLLLHTTTTTGVSEQSSHRSFGMRNFKYITAIKAAVERECPATVSCADILALAARDGVAMLGGPSVAMRTGRRDSRESYYGPNHNDSVFTVLSSLRPSGXXXGXXVALLGAQSVGRVXCFNLVGRLYPQVDGSMEAAYGEYLRGRCPTAAATEDTREVVYARNDRVXPMLIDXMYYRNLLAGRGLLLVDQQLASDARTAPYVRRMAADNDYFHQRFAAALLTMSENAPLTGAQGEVRKDCRFVNSS

SEQ ID NO: 315 - DNA, 798 bp, Oryza sativa
atggaattcggacgaactccagcccttcaaatcatcgttggggtcctatggtcgcagctgcagttcggcgctgaggcagtcggcacgacggtcttcacgctgcgcaacaactgcacctacaccgtctggccggccaccttgtccggcaacaccgcggtggccgtcgggggcggcgggttcgagctgtcgcccggcgccaacgtctcgttcccggccccggctggttggtccggccgcttgtgggcgcgcacggactgtgcaccctccggcaccgcgtccctcgcctgcgtcacgggggactgcggcggcgccgtgagctgctccctcggcggcgcgccgcctgtcaccctcgccgagttcacgctgggcggcaccgacgggaaggacttctacgacgtgagcctggtggacgggtacaacgtcggcatcggcgtggcggcgacgggcgccagggtgaaccgctcgacgtgcgggtacgccgggtgcgtcggcgacgtgaacgcgctgtgccccgcggagctgcaggtggcggggaaggagaacgaccagcagtccggggcggcggcgacgacgacggtggcgtgccggagcgcgtgcgaggcgttcgggacggcggagtactgctgcacgggggcgcacggcgggccggacagctgcgggccgacgaggtactcgcggctgttcaaggcggcgtgcccggcggcgtacagctacgcgtacgacgaccccaccagcacgttcacgtgcggcaccggcgcgcagtacgtcatcaccttctgccccgcgcagcagcagtga

SEQ ID NO: 316 - protein, 265 aa, Oryza sativa
MEFGRTPALQIIVGVLWSQLQFGAEAVGTTVFTLRNNCTYTVWPATLSGNTAVAVGGGGFELSPGANVSFPAPAGWSGRLWARTDCAPSGTASLACVTGDCGGAVSCSLGGAPPVTLAEFTLGGTDGKDFYDVSLVDGYNVGIGVAATGARVNRSTCGYAGCVGDVNALCPAELQVAGKENDQQSGAAATTTVACRSACEAFGTAEYCCTGAHGGPDSCGPTRYSRLFKAACPAAYSYAYDDPTSTFTCGTGAQYVITFCPAQQQ

SEQ ID NO: 317 - DNA, 936 bp, Oryza sativa
  misc_feature (49)..(49): k = guanine or thymine
atggagttcatcacgccaatcgtgaggccggcatcggcggcggcgggckgcggcaaggtgcaggagagtggtgggaggagcttggcggcggtggagaaggagcacatgttcgacaaggtggtgacgccgagcgacgtggggaagctgaaccggctggtgatcccgaagcagcacgcggagaagtacttcccgctggacgcggcgtccaacgagaaggggctcctgctcagcttcgaggaccgcacggggaagccatggcggttccgctactcctactggaacagcagccagagctacgtgatgaccaaggggtggagccgcttcgtcaaggagaagcgactcgacgccggggacaccgtctccttcggccgcggcgtcggcgaggccgcgcgcgggaggctcttcatcgactggcgccgccgccccgacgtcgtcgccgcgctccagccgcccacgcaccgcttcgcccaccacctcccttcctccatccccttcgctccctgggcgcaccaccacggacacggagccgccgccgccgccgccgccgccgccggcgccaggtttctcctgcctccctcctcgactcccatctacgaccaccaccgccgacacgcccacgccgtcgggtacgacgcgtacgccgcggccaccagcaggcaggtgctgttctaccggccgttgccgccgcagcagcagcatcatcccgcggtggtgctggagtcggtgccggtgcgcatgacggcggggcacgcggagccgccgtcggctccgtcgaagcgagttcggctgttcggggtgaacctcgactgcgcgaattccgaacaagaccacgccggcgtggtcgggaagacggcgccgccgccgctgccatcgccgccgtcatcatcgtcatcttcctccgggaaagcgaggtgctccttgaaccttgacttgtga

SEQ ID NO: 318 - protein, 311 aa, Oryza sativa
MEFITPIVRPASAAAGRGKVQESGGRSLAAVEKEHMFDKVVTPSDVGKLNRLVIPKQHAEKYFPLDAASNEKGLLLSFEDRTGKPWRFRYSYWNSSQSYVMTKGWSRFVKEKRLDAGDTVSFGRGVGEAARGRLFIDWRRRPDVVAALQPPTHRFAHHLPSSIPFAPWAHHHGHGAAAAAAAAAGARFLLPPSSTPIYDHHRRHAHAVGYDAYAAATSRQVLFYRPLPPQQQHHPAVVLESVPVRMTAGHAEPPSAPSKRVRLFGVNLDCANSEQDHAGVVGKTAPPPLPSPPSSSSSSSGKARCSLNLDL

SEQ ID NO: 319 - DNA, 2058 bp, Oryza sativa
atggcgcgtccacttcttccgatcacgtaccagcacgcggcggcgtcttccccattggagcaatggatgaagcggttcgaggaggcggagaggctcgtggccgacgtcgtcgagaggatcgcggagagggagtccgtctcgccgtcgctgccgcaggagctgcagcggcgaaccgccgaaatcaggaggaaagtcgcgattctcgagaccaggcttgacatgatgcaggaagacctttctcaactcccaaacaagcaacgcataagcctgaaagagttgaacaagctagcagccaagcactccactctgagctccaaggtgaaggaggttggcgctccgttcacccggaagcgcttctccaataggagcgacctgcttggaccggacgacaaccacgcaaagatcgatgtaagcagcattgccaatatggacaaccgtgagatcattgagttgcagaggaacgttattaaagagcaagacgacgaattggacaagctggaggagacgatagtcagcaccaagcacattgcgctggcgatcaacgaagagttggatctgcacactaggttgattgatgacttagacgagaaaacagaagagacaagcaaccagcttcagcgtgcgcagaaaaagttgaaatctgtaacaacacgcatgaggaaaagcgcttcctgctcatgccttctcctgtcggttattgcagttgtaattcttgtagctctattatgggctctcatcatgtcaaagaaacgtacgccccagtgccccactagcataaaaactatcacacttgtgctgcccttcaccgatccctgccctatgacatgccctgcaaagggcaaaactacctcgatcagcaccatttgcacgcttaaccacatgatggctgccatttttatatccaagcctctagaactccatgcacgttcggcactgtcccagtttaaaatccctcatccgagtaatctcctatcccttggtaacaatgacaaattaatttacaacgccactcgtttagtggttcagtggtcactactacaatggcaccaaacaacagatggtcaatcgcaagtcgcagccagggttaaacctatcagtttagccgatttgatcggtgcagtagtcgtggcactgagcttgtgcattggaggtgtgcaaggtcagctccaggtagggttctacgaccaatcgtgcccccaggccgaagtgattgtgagagacgaggtcggcaaggccgtgagcgccaacgttggcctcgccgccggccttgtccggatgcacttccatgactgcttcgtcaagggatgtgacgcgtcggttttgctggattcgacggcgaacagcacggcggagaaggacgcgataccgaacaagagcctgagggggttcgaggtggtggacagcgccaagcggcggctggagagcgcgtgcaagggggtggtctcctgcgcggacatactcgccttcgccgccagagacagcgtcgtgctggccggcggcaccccgtaccgcgttccggccgggaggagggacggcaacacctccgtggcgtccgacgcgatggccaacctgccccgtcccacctcagatgtggcccaactcacacaaagtttcgccactcatgggctttcccaggacgacatggtcatcctttcaggggcgcacacgataggggtggcgcattgcagctcgttcagctcgaggctgtacgggtacaactccagcacggggcaggacccggcgctgaacgcggcgatggcgtcgcggctgtcgcggagttgcccgcaggggagcgccaacacggtggccatggacgacggcagcgagaacacgttcgacaccagctactaccagaacctcctcgccggccgcggcgtcctcgcctccgaccagacgctcaccgccgacaacgccaccgccgcgctcgtggcgcagaacgcctacaacatgtacctcttcgccaccaagttcggccaggccatggtcaagatgggcgccatccaggtgctcaccggcagcgacggccagatccgcacaaactgcagggttgcaaactga

SEQ ID NO: 320 - protein, 685 aa, Oryza sativa
MARPLLPITYQHAAASSPLEQWMKRFEEAERLVADVVERIAERESVSPSLPQELQRRTAEIRRKVAILETRLDMMQEDLSQLPNKQRISLKELNKLAAKHSTLSSKVKEVGAPFTRKRFSNRSDLLGPDDNHAKIDVSSIANMDNREIIELQRNVIKEQDDELDKLEETIVSTKHIALAINEELDLHTRLIDDLDEKTEETSNQLQRAQKKLKSVTTRMRKSASCSCLLLSVIAVVILVALLWALIMSKKRTPQCPTSIKTITLVLPFTDPCPMTCPAKGKTTSISTICTLNHMMAAIFISKPLELHARSALSQFKIPHPSNLLSLGNNDKLIYNATRLVVQWSLLQWHQTTDGQSQVAARVKPISLADLIGAVVVALSLCIGGVQGQLQVGFYDQSCPQAEVIVRDEVGKAVSANVGLAAGLVRMHFHDCFVKGCDASVLLDSTANSTAEKDAIPNKSLRGFEVVDSAKRRLESACKGVVSCADILAFAARDSVVLAGGTPYRVPAGRRDGNTSVASDAMANLPRPTSDVAQLTQSFATHGLSQDDMVILSGAHTIGVAHCSSFSSRLYGYNSSTGQDPALNAAMASRLSRSCPQGSANTVAMDDGSENTFDTSYYQNLLAGRGVLASDQTLTADNATAALVAQNAYNMYLFATKFGQAMVKMGAIQVLTGSDGQIRTNCRVAN

SEQ ID NO: 321 - DNA, 972 bp, Oryza sativa
  misc_feature (135)..(135): y = cytosine or thymine
  misc_feature (139)..(139): m = adenine or cytosine
  misc_feature (156)..(156): y = cytosine or thymine
  misc_feature (169)..(169): r = adenine or guanine
  misc_feature (197)..(197): k = guanine or thymine
  misc_feature (199)..(199): r = adenine or guanine
atgcactcctatgtttttgcaggtgtccacggtgtttgctatggcatgaacggcgacaacctcccgtcgcagagcgaggtcgtgcagctgtacaagtccaatggcatcggtgctatgcgcatctacagcccggaycagmaggccctcgacgcgctycgcggcagcggcrtcgccgtcatcatcgacgtcggcggcakcrgcgcggtggccaacctcgccaacaacccctccgccgccgccgactgggtgcgtgacaacgtccaggcctactggccgaacgtcatcatccggtacatcgccgtcggcaacgagctcggccccggcgacatggggaccatcctcccggccatgcagaacgtgtacgacgcgctcgtgtccgccggcctctcgaacagcatcaaggtgtcgacggcggtgaggatggacgcgatcaccgactcgttccctccgtcgcacggcgtgttccgcccggacctgcagcagttcatggtgcccatcgcgcagttcctcgccaacaccatgtcgccgctgctcgccaacgtgtacccctactttgcctacagggacaacccgcgcgacatcccgctcaactacgccacgttccagccgggcaccacggtgagggacaacgacagcggcctcacctacaccaacctcttcagcgccatggtggacgccgtgtacgccgcgctggagaaggccggcgagcccggcgtccgcgtcgtcgtgtcggagagcgggtggccgtcggcgggagggttcgcggcgaacgtggagaacgcgaggaatcacaaccagggcgtgatcgacaacgtcaagaacgggacgccgaagcggcccgggcagctggagacgtacgtgttcgccatgttcaacgagaaccagaagcccggggatgagaccgagaggcattttgggctcttctaccctgacaagacgccggtctacccgattacgtttcctccgaactag

SEQ ID NO: 322 - protein, 323 aa, Oryza sativa
  X_region (47)..(47): Xaa = any naturally occuring amino acid
  X_region (57)..(57): Xaa = any naturally occuring amino acid
  X_region (66)..(67): Xaa = any naturally occuring amino acid
MHSYVFAGVHGVCYGMNGDNLPSQSEVVQLYKSNGIGAMRIYSPDQXALDALRGSGXAVIIDVGGXXAVANLANNPSAAADWVRDNVQAYWPNVIIRYIAVGNELGPGDMGTILPAMQNVYDALVSAGLSNSIKVSTAVRMDAITDSFPPSHGVFRPDLQQFMVPIAQFLANTMSPLLANVYPYFAYRDNPRDIPLNYATFQPGTTVRDNDSGLTYTNLFSAMVDAVYAALEKAGEPGVRVVVSESGWPSAGGFAANVENARNHNQGVIDNVKNGTPKRPGQLETYVFAMFNENQKPGDETERHFGLFYPDKTPVYPITFPPN

SEQ ID NO: 323 - DNA, 939 bp, Oryza sativa
  misc_feature (213)..(213): r = adenine or guanine
atgggggaggagaaagtggcgccgaagtctgacgctgccccggcggtggagttgctggggttcgtgatgagcgcggaggaggccgagcgcgccgcggcggcgcccggggtggagacggtggaggacctgctgccgctgctcgtcccttccgcgatgcggcgcgcgcgtgccccgatctcgcggttccccgtgggcgccgtgggcctcggcgcragcggccgcgtctacgccggcgtaaacctcgagttccggggcctcccgctgtcccattccgtccacgccgagcagttccttgtcgtcaacgcggccgccgcggggaattcggagctgcgcgccgtcgccgtctcccacatgccctgcggccaatgccgccagttcctccaggagatccgcggcgccggtgggatccgaatcattgtcacctccgacgccgaggacggctgcgcccccgagtggcgcacggtggcgtccctcctcccgggccccttcgggccccatgatctcctccccaagcacgtccccctcgtcctcgaaccgcacgacaaccctctcggcgaacccgccgccgtcgccaatggcttcgcccacggtgacctagaggcgcgcctgagggaggcagcggaggcggccgcgcgggcggcgcatgcgccgtatagcgagtgcccgtcgggattcgccgtggcggacggcgaagggaaggtgtacgccggaggatgcctggagtccgcggcgtataatccgacactaggccccgtgcaggcggccatcatagggatggtggccgccgggggcggcgccgccggagacgtggtggcggcggcgctcgtggagaaggaagcggggttggtgtcgcaggaagcgacggccaggatcttcctggccgcggtggccccacaggccaccttccacgtgtacaattatacaccgtccgatgcatga

SEQ ID NO: 324 - protein, 312 aa, Oryza sativa
MGEEKVAPKSDAAPAVELLGFVMSAEEAERAAAAPGVETVEDLLPLLVPSAMRRARAPISRFPVGAVGLGASGRVYAGVNLEFRGLPLSHSVHAEQFLVVNAAAAGNSELRAVAVSHMPCGQCRQFLQEIRGAGGIRIIVTSDAEDGCAPEWRTVASLLPGPFGPHDLLPKHVPLVLEPHDNPLGEPAAVANGFAHGDLEARLREAAEAAARAAHAPYSECPSGFAVADGEGKVYAGGCLESAAYNPTLGPVQAAIIGMVAAGGGAAGDVVAAALVEKEAGLVSQEATARIFLAAVAPQATFHVYNYTPSDA

SEQ ID NO: 325 - DNA, 726 bp, Oryza sativa
atggagccctcccccgtcggcggcgggtccgcctccgggtcggtggagcggtggcgcgcggaggcgtcgcgggcgttccagcactacctggatcgggcggcgccgcacacggcggggcggtgggccggcacgctcgtggccgcggcggtgtacgcgctgcgggtctactacgtgcaggggttctacgtcgtcacctacggcctcggcatctacctcctcaacctcctcatcgggttcctctcccccatggtcgacccggagctcgaggcgctcgacgccggcccggccctccccacccgcggctccgacgagttcaagcccttcatccgccgcctccccgagttcaagttctggtatacgatttttcctgattcgcttctgatcctaggcagcaaactggtgtatgccatcacaaaagccttttgtgttgcttttctgatgacattcttctctgtattcgacgttcctgtcttctggccaatacttctctgctattgggttgtgctttttgtcctgacaatgaagcggcaaattgtgcatatgataaagtacaagtatgtcccattcagcataggaaagcagtgtgatatactcccctctgttcatcaatatcggtgtcaaatattagtgatcagaggtagtatcatagccaagcacatattcttctgtgcaatgactcgttcatttatagttcttgtgctgtgcggctcttgtgtggacgagtaa

SEQ ID NO: 326 - protein, 241 aa, Oryza sativa
MEPSPVGGGSASGSVERWRAEASRAFQHYLDRAAPHTAGRWAGTLVAAAVYALRVYYVQGFYVVTYGLGIYLLNLLIGFLSPMVDPELEALDAGPALPTRGSDEFKPFIRRLPEFKFWYTIFPDSLLILGSKLVYAITKAFCVAFLMTFFSVFDVPVFWPILLCYWVVLFVLTMKRQIVHMIKYKYVPFSIGKQCDILPSVHQYRCQILVIRGSIIAKHIFFCAMTRSFIVLVLCGSCVDE

SEQ ID NO: 327 - DNA, 1206 bp, Oryza sativa
atggaactaacgaactgtgaatgcgagatactgatcctaacacctttttggcccaatcgcacgcaggaatctgtacgtgaggttttttggcggccctgcaacttgccgtgccatcggcgcggcttgattggcgaaccgaccaaaatgtacagcgccgtttttttggttcctatatactccccccagctgctgctgtcccggcgtctcgtccgatcgatttcgtatagtatcatatcactgatgaaagaggcagcagtgcagatcggcacggaagactttcctgaagatagggaccgccatgatttagaagacttcgacattttcaaacacttgaggacaactttccaattcaataacaatactactccacacgtggctgaaatggctgaaaaagttccagtacccctggcccaccctaccgacattcaatggcgccacgtcagacaaatcgaacgacctgcggggatcctcgtcatcatccgggacccacccccactgccactggcattcccatcccaatcccattattccgccgctgacgtcacgcatcccatcacacacgtcacgacgccgccgccggaggtgttcccggcggcgcgcgcggaggtgtgcggggtttgcgggatggaccagtgcctcgggtgcgagttcttcgccggggagtccggggtggtgtcgttcgatggcgcggagaaggtggcggcggcggccgccgcggcggcggctggcgccgcggcggggcagaggaggaggaggaagaagaagaacaagtaccgcggcgtgcggcagcggccatgggggaagtgggctgcggagatccgcgaccctcgccgagcggtgcgcaagtggctggggacgttcgacaccgccgaggaggccgccagggcgtacgaccgcgccgccgtcgagttccgcggcccgcgcgccaagctcaacttcccgttccccgagcagctctccgcgcacgacgacagcaatggcgacgccagcgccgccgccaagtccgacacattgtctccgtcgccgcgcagcgcagacgccgacgagcaagtagagcacacgcggtggccgcagggaggaggaggcggcggcggcggcggcggcggcgagacaggggaccagctctgggaaggcttgcaagacctgatgcagctggacgaaggcgggctcagctggttcccacagtcgtcagattcttggaattga

SEQ ID NO: 328 - protein, 401 aa, Oryza sativa
MELTNCECEILILTPFWPNRTQESVREVFWRPCNLPCHRRGLIGEPTKMYSAVFLVPIYSPQLLLSRRLVRSISYSIISLMKEAAVQIGTEDFPEDRDRHDLEDFDIFKHLRTTFQFNNNTTPHVAEMAEKVPVPLAHPTDIQWRHVRQIERPAGILVIIRDPPPLPLAFPSQSHYSAADVTHPITHVTTPPPEVFPAARAEVCGVCGMDQCLGCEFFAGESGVVSFDGAEKVAAAAAAAAAGAAAGQRRRRKKKNKYRGVRQRPWGKWAAEIRDPRRAVRKWLGTFDTAEEAARAYDRAAVEFRGPRAKLNFPFPEQLSAHDDSNGDASAAAKSDTLSPSPRSADADEQVEHTRWPQGGGGGGGGGGGETGDQLWEGLQDLMQLDEGGLSWFPQSSDSWN

SEQ ID NO: 329 - DNA, 3414 bp, Oryza sativa
atgcgaaaaggaataaatgtgaagaaaaatgttccgaaaatcctgtcgtcgtcgcagccgctgtcctcctcatcctcccgtcgccaccgccgtggtcgacttcgccctaccgtcaacagatccacgcggggaggggagggggcgctggatccgatcgaggaagggccacagccggatttgagcacggcagagccgcgcgctcgtcgttatcgctcctcacctcctttatcgggcggggaaaggccgtcccacgcgcgccacctcgcctccgcgatccccgacgccgcgaggcacgagaagatttcagataaaacccggccgttacacgagactcgtcctctcttctctcccaccctcgtccgttcttatccacctccacgcccatcacgcttgcggccgtttccatccttccgcttcatcggagtagttcgccgccgggttgggttttcttcttctcttgatgcgacgtggaggcggcgagttgttcgtcgggtgcacgaaccggtgatttttttttgttttggcgatgcctttgcgctctcctgccacaaccttcctcgaacctcgtttgccgcggcggacgacgcggcgccgtcgcccgcgtcgctgcgcctcccgcgcgtcatgtcggcggcgtcgccggcctcgcccacgtcgccgtccacgccggcccccgcgcggagggtggtcgtgtcgcaccgcctcccgctccgcgccgcggccgacgcggcgtcgccgttcgggttctccttcacggttgactcggacgccgtcgcgtaccagctccgctcggggctgccccccggcgcgcccgtcctccacatcggcacgctcccgccgcccgcaaccgaggcggcctccgacgagctctgcaactacttgctggcgaacttctcttgcctgccggtgtacttgcccgccgatctccaccgccgattctaccatggattctgcaagcactacctgtggcctctcctccattaccttctgccgctcacgccgtcgtcgctgggcgggttgccgttcgaccgcgcgctctaccattctttcctctcggcgaaccgggccttcgccgaccgcctcaccgaggtgctcagccccgacgacgacctcgtctggatccacgattaccacctccttgccctccccaccttcctccgcaagcgattcccgcgcgccaaggtcggtttcttcctccactcgccgttcccctcctcggagatcttccgcaccattcccgtcagggaggacctcctccgcgccctcctcaacgccgacctcgtcggcttccacaccttcgactacgcgcgccacttcctctccgcctgctcgcggctgctcggcctggattaccagtccaagcgcggctacatcggcatcgagtactatggtcgcaccgtcacggtcaagattctgcccgtcgggatcgacatgggccagctgaggtcggtggtgtcggcgccggagacgggggacctggtgcggcggctcaccgagtcgtacaaggggcggcgcctgatggtcggcgtcgacgacgtcgacctgttcaagggaatcgggctcaagttcctggcgatggagcagctgctggtggagcacccggagctgcgcggccgcgcggtgctcgtgcagatcgcgaacccggcgcgcagcgaggggcgcgacatccaggaggttcagggagaagccagggcgatcagcgcccgcgtcaatgcgcggttcggcacgccggggtacacccctatcgtgctgatcgaccgcggtgtgtcggtgcacgagaaggcggcgtactacgcggcggccgagtgctgcgtggtgagcgccgtgcgggacggcctcaaccggataccctacatctacacggtgtgccggcaggagagcactggcctggatgatgcggccaagcgcagcgtcattgtgctgtcggagttcgtcgggtgctccccgtcgctcagcggcgcaatccgggtcaacccatggagtgtggagtctatggcagaggccatgaatgcagccctgaggatgcctgagccagagcagcggctgcgacatgagaagcactacaagtatgtgagcacccatgatgttgcctactgggcgaaatctttcgaccaggacctgcagcgagcttgcaaggatcatttctcgcggcggcattggggtattgggtttgggatgagtttcaaggtggtggcacttggcccgaatttcaggcggctgtctgtcgatcacattgtgccgtcataccggaagtctgataatcgcttaattctcttggactatgatggcacagtgatgccagagggttcaattgataaggcaccgagcaatgaggtcatctctgtattgaatcgtctgtgcgaggaccccaagaacagagtgttcatcgtgagcggtagagggaaggatgaacttggcagatggtttgcaccttgtgagaagctggggattgctgcagagcatggttacttcacaaggtggagcagggactcagcttgggagacctgcgggttggccgtggactttgattggaagaagactgcagaaccagtgatgaggctttacaaggaggcaacagatggttcaaccatcgaagacaaggaaagcgcgttagtttggcaccacgatgaggcagatccagattttggttcatgccaggcaaaggaactgcttgaccacctcgaaaacgttcttgcaaatgaaccagtcgttgttaagaggggccagcatatcgtcgaagtaaatccacagggcatcagcaaaggtgtggttgtggacaacctcttgtcatccatggtgagccgagggaaggcgcccgatttcgtgctgtgcattggggacgaccggtcggacgaggacatgttcgagagcatcgtttgcccgtcgaacagcagcgtcaagctcccggcgagcagcgaggtgttcgcctgcacggtcggcaagaagccgagcatggccaagtactacctcgacgacacggtcgacgtgatcaagatgctgcagggtctcgccaatgcgccatcgcagcggccaaggcaatggccgtctcgttcgggcattttggccatgcttttcacctttgctgcattattacagaccgatatggatgcccaaacgccggatagcgccagtgtcgcagaccttgggtcctccttatccggctacgtctccactctcttctcttgccggcgcctgacgctgaccggaggatcgccgccgatattggcagcagcagcagcacattcctctcctgatccgaatgctgtggaaacgttcctgatgttagtaggcacagttgatgtggtacacgagaggctgtggaggacaacgctgatgataaaaaggacagacgatccatcatttcatctcaccggcaagagacttttggccgaaataattcagatgtccggctga

SEQ ID NO: 330 - protein, 1137 aa, Oryza sativa
MRKGINVKKNVPKILSSSQPLSSSSSRRHRRGRLRPTVNRSTRGGEGALDPIEEGPQPDLSTAEPRARRYRSSPPLSGGERPSHARHLASAIPDAARHEKISDKTRPLHETRPLFSPTLVRSYPPPRPSRLRPFPSFRFIGVVRRRVGFSSSLDATWRRRVVRRVHEPVIFFCFGDAFALSCHNLPRTSFAAADDAAPSPASLRLPRVMSAASPASPTSPSTPAPARRVVVSHRLPLRAAADAASPFGFSFTVDSDAVAYQLRSGLPPGAPVLHIGTLPPPATEAASDELCNYLLANFSCLPVYLPADLHRRFYHGFCKHYLWPLLHYLLPLTPSSLGGLPFDRALYHSFLSANRAFADRLTEVLSPDDDLVWIHDYHLLALPTFLRKRFPRAKVGFFLHSPFPSSEIFRTIPVREDLLRALLNADLVGFHTFDYARHFLSACSRLLGLDYQSKRGYIGIEYYGRTVTVKILPVGIDMGQLRSVVSAPETGDLVRRLTESYKGRRLMVGVDDVDLFKGIGLKFLAMEQLLVEHPELRGRAVLVQIANPARSEGRDIQEVQGEARAISARVNARFGTPGYTPIVLIDRGVSVHEKAAYYAAAECCVVSAVRDGLNRIPYIYTVCRQESTGLDDAAKRSVIVLSEFVGCSPSLSGAIRVNPWSVESMAEAMNAALRMPEPEQRLRHEKHYKYVSTHDVAYWAKSFDQDLQRACKDHFSRRHWGIGFGMSFKVVALGPNFRRLSVDHIVPSYRKSDNRLILLDYDGTVMPEGSIDKAPSNEVISVLNRLCEDPKNRVFIVSGRGKDELGRWFAPCEKLGIAAEHGYFTRWSRDSAWETCGLAVDFDWKKTAEPVMRLYKEATDGSTIEDKESALVWHHDEADPDFGSCQAKELLDHLENVLANEPVVVKRGQHIVEVNPQGISKGVVVDNLLSSMVSRGKAPDFVLCIGDDRSDEDMFESIVCPSNSSVKLPASSEVFACTVGKKPSMAKYYLDDTVDVIKMLQGLANAPSQRPRQWPSRSGILAMLFTFAALLQTDMDAQTPDSASVADLGSSLSGYVSTLFSCRRLTLTGGSPPILAAAAAHSSPDPNAVETFLMLVGTVDVVHERLWRTTLMIKRTDDPSFHLTGKRLLAEIIQMSG

SEQ ID NO: 331 - DNA, 1041 bp, Oryza sativa
atggcatcgccaccctcgctgctgcccagcgccggcgaggacgacgaatcccagcgagaagtttacgagcagctccgccagctcgtgtcgacctacccgaccgtgccgagcggcctcgacaccccgtactaccgccaccccgacggctggtacacgttcttgccggcgatggtcagcgtcatggtggcgcagcgccacttcaccgcccgcgacaccgacatcatcatcgccaccttccccaagtgtggcaccacctggctcaaggcgctcctcttcgcgaccgtccaccgcgacggcggcggcgccggcggcttggaggacgacgcggcgctcgcgcagctcagggcgcggaacccgcaccagctcgtcccgttcctcgagatccaggtgtacgtgcgcgacagggcgcccgacctgagctccctcccggcgccacggctcctcgcgacgcacatcccgcgcccgtccctgccggcctccgtcgccatctccggctgcaaggtggtgtacatgtgccgcgaccccaaggactgcctcgtgtcgctgtggcacttcctggacgcgcagcggccggagccacgcggcgacgtcggcgaggacttccgcctcttctgcgacggcgtgtcgctggtcgggccgtactgggaccacgtgctggcttactggcggtggcacgtcgagcggccggggcaggtgctgttcatgacgtacgaggagctgagcggcgacacgctggggcagctgcgccgcctcgcggagttcgtcggccggccgttcaccggcgaggagcgggcggcccgggtggacgaggcgatcgtgaaggcgtgcagcttcgagagcctagcgggcgcggaggtgaacaggtcagggacgattgagctgatggaggagccgatgcggaacgccgagttcttccggcgaggcgtcgtcgggggctggccgaactacctgtcgccggagatggccacaaggatcgacgagattaccgagagcaagttcagaggctctggactggtgttgcccacgatgatgaccatgtaa

SEQ ID NO: 332 - protein, 346 aa, Oryza sativa
MASPPSLLPSAGEDDESQREVYEQLRQLVSTYPTVPSGLDTPYYRHPDGWYTFLPAMVSVMVAQRHFTARDTDIIIATFPKCGTTWLKALLFATVHRDGGGAGGLEDDAALAQLRARNPHQLVPFLEIQVYVRDRAPDLSSLPAPRLLATHIPRPSLPASVAISGCKVVYMCRDPKDCLVSLWHFLDAQRPEPRGDVGEDFRLFCDGVSLVGPYWDHVLAYWRWHVERPGQVLFMTYEELSGDTLGQLRRLAEFVGRPFTGEERAARVDEAIVKACSFESLAGAEVNRSGTIELMEEPMRNAEFFRRGVVGGWPNYLSPEMATRIDEITESKFRGSGLVLPTMMTM

SEQ ID NO: 333 - DNA, 1785 bp, Oryza sativa
  misc_feature (390)..(390): m = adenine or cytosine
  misc_feature (437)..(437): y = cytosine or thymine
  misc_feature (439)..(439): s = guanine or cytosine
  misc_feature (446)..(446): s = guanine or cytosine
atggcgttggctggattgcccctctccgtctttgccatcgctgtccatttttgccttgttttctcctcctcctcttctcctccggtttgccctgcaaacggccaccgtgaccgaacggcgtaccacttccaacccgccaagaactggcagaacgggcctgtgtactacaatggcatgtaccacctcttctaccagtacaacccgcacggcgcgctctgggacgtcggcaacctctcctgggggcactccgtctccggcgacctcgtgaactgggccgccctcgacaacgcgctcgatcccacagcgccattcgacgccaatggttgcgcgtcggggtcagtcaccatcctccccgacggcgtgcccgtcgtcatgtactccggcatcgamggcccgccgccggcaggtccagaacgtcgcgttccccaagaaccctygsgacccgsttcctccgcgagtggaccaagcccgggtacaacccggtcatccctgtccccgccgacgtctcgccggacaatttccgggaccccaccaccgcctggctcggcagcgacggcctgtggcggttcgccatctccgccgtggccgacggcgtgggcgcgacgctcgtgtaccggaagcgccgacttcctgcggtgggagcgcaacgcggcgccgctgcacgcctcgcgggacgcggtcatggccgagtgccccgacctgttccccgtcgccgagcacggcgaggacgggctcgacctcgacgcgtcggcgatcggcggcgccggcgccggcgtgaggcacgtcctcaaggtcagcatgccggacaccctcgaggactactacatggtcggacggtacgacgacgcggacgacacgttcaccgtgccgccggaggacctggaagcccacggcgatgactaccggcggtggcggcggatcgaccacggccacctgtacgcgtccaagacgttctacgacgcgggcaagaaacggcgcgtgctgtgggcgtgggtgaacgagtccgacagcgaggccgacgacgtcaccaagggctggtccggccttcagtcgtttccgcgggcggtgtggctggacgagggcgggaggcagctggtgcagtggccggtggaggagatcgagacgctgaggcggaaacgcggcgttctgctcggcggaaacgaggtggaggcgggcgggctgcgcgagatcggcggcatcgcgggctcgcaggcggacgtggaggtagcgttcgagatcgcgagcctcgcgggcgccgaccgcctcgagcccgaccatttgcgtgaccccgacgcgctgtgcggggagaatggcgcggcggtgcacggcggaatcggcccgttcgggctgctcgtcatggcatccggcgacctgcgcgagcgcaccgccgttttcttcagggtgttcaggctctcgcacgggtacacggtcctcatgtgcacggacctgacacggtcaacttcaagagcaggggtgtacaagccatcccacggaggattcgtggacatagacatagagaaggacagggctatatcgcttcgaaccctgatcgatcattcgatcgtggagagttttggcggtggggggcggacgtgcatgacggctcgagtgtaccctgaacatgtagcaacggggagcagccacctgtacgtgttcaacaatgcgtcagatgcggtgaaggtgtccaagctggaggcatgggagctcgcgacggctagtgtcaatgctggagacgacgggctgatttcgtatggtggtcctgtatgtgctgctcaagtgcagtaa

SEQ ID NO: 334 - protein, 594 aa, Oryza sativa
MALAGLPLSVFAIAVHFCLVFSSSSSPPVCPANGHRDRTAYHFQPAKNWQNGPVYYNGMYHLFYQYNPHGALWDVGNLSWGHSVSGDLVNWAALDNALDPTAPFDANGCASGSVTILPDGVPVVMYSGIEGPPPAGPERRVPQEPSRPASSASGPSPGTTRSSLSPPTSRRTISGTPPPPGSAATACGGSPSPPWPTAWARRSCTGSADFLRWERNAAPLHASRDAVMAECPDLFPVAEHGEDGLDLDASAIGGAGAGVRHVLKVSMPDTLEDYYMVGRYDDADDTFTVPPEDLEAHGDDYRRWRRIDHGHLYASKTFYDAGKKRRVLWAWVNESDSEADDVTKGWSGLQSFPRAVWLDEGGRQLVQWPVEEIETLRRKRGVLLGGNEVEAGGLREIGGIAGSQADVEVAFEIASLAGADRLEPDHLRDPDALCGENGAAVHGGIGPFGLLVMASGDLRERTAVFFRVFRLSHGYTVLMCTDLTRSTSRAGVYKPSHGGFVDIDIEKDRAISLRTLIDHSIVESFGGGGRTCMTARVYPEHVATGSSHLYVFNNASDAVKVSKLEAWELATASVNAGDDGLISYGGPVCAAQVQ

SEQ ID NO: 335 - DNA, 489 bp, Oryza sativa
atggacgcgaagaggacgccgccgccgccgacgccgccgaaccctaaccctagcgtaattggcagcggcgccgccgcggacggcggcggatttgggaggggggaagcggcggcggcgacgaagcacatgctggccttccacttcctgcgcgcgctgtcgcggatccaccgggcgacacccgtgacgcggcgcacgcggaccatccgccgggcggcctactcctccatggcgcgggcggcgagcccgcgccgcgctttgaaccgggcgctgctcggccaggtccgcgcgcggaggtccaggacgctgatgaggcgcgccgccgtgctgcagggcgagccgccgagggccgaagcgctccggcgcctggtccccggcggcgccggcatggagtactccagcctcctggaggagaccgccgactacctccgctcgcttcgcgcgcaggtgcagctgatgcaaggcctcgtcgacctcttctcctaccaatga

SEQ ID NO: 336 - protein, 162 aa, Oryza sativa
MDAKRTPPPPTPPNPNPSVIGSGAAADGGGFGRGEAAAATKHMLAFHFLRALSRIHRATPVTRRTRTIRRAAYSSMARAASPRRALNRALLGQVRARRSRTLMRRAAVLQGEPPRAEALRRLVPGGAGMEYSSLLEETADYLRSLRAQVQLMQGLVDLFSYQ

SEQ ID NO: 337 - DNA, 1449 bp, Oryza sativa
atggcgttcgcggcgaccaagccgagcaagtctccccttctcatcctcctcgtctccggcgtcgcgttcctgctcctcgcctccgccgccgagtgctacggcggcggccgccacgatgtgacgcggtcggccgtggcgcggcgctccggcgtcgggagccggcggcagtacgtgcgccaccgcctgaccggcggcgccgtggacgttccgcacagcgacgacgacggaggcgccggcggcgggaagcaccaccgcagccacaagcaccgggtgcggaactggatcatcgggttcgtggtcgggtccctcgccggcgtcgtctccgggctggcgatgtcggtgctgttccggatggcgctcaactgcgttcggggggggtaccggagcaagtccgacacggtgatcttcatcccgaagctgatcaagagcaaggagcacctggcgttcctggagaaggaccaggacgggctggcgtcgctcgccgtgatcgggcgcggcggctgcggcgaggtgtacaaggcgcagctcccgccggagcgggaaggcgacgcgccgcggttcatcgccatcaagaagatcaagaagcgctccggcgacggctccggcggccagaacaacaacctgagcgacgaggagagccggcagcttgacaagtggacgcggcagatccagtcggagatccgcaccgtgggccacatccgccaccgcaacctcctcccgctcgccgcccacgtcccgcgccccgactgccactacctcgtctacgagttcatgaagaacggcagcctccacaacgcgctcaaggccaccaccaccgacaccacgacgaacgactacaacgacaacaacagcggcgagcatccgccgccgtcgccggcgctgccgtggccggcgcggctgcggatcgcggtggggatcgcggcggggctggagtacctgcacgtgtcgcagcggccgcagatcatccaccgcgacctgaagccggcgaacatcctcctggacgacgacatggaggcgcggatcgccgacttcggcctcgccaaggcgatgcccgacgcgcacacccacatgacgacctcgaacgtggccgggacgctggggtacatcgcgccggagtaccaccagactctcaagttcacggccaagtgcgacgtgtacagcttcggcgtcatcctggcggtgctgggcaccgggaaggagccgacggacaagttcttcgcgcagcaggtggtggacgacgtcgggatcgtgcggtggctgcggcgggtgatgcaggaaggggaccccgccgcgcaggccggggtcatcgacgccgccatcgccggcgcgggccacgacgagcagatcctcctcgtcctccgcatcgccgtgttctgcaccgccgacgaccccaaggaccgccccaccgccaaggacgtccgctgcatgctctcccagatcaagaactag

SEQ ID NO: 338 - protein, 482 aa, Oryza sativa
MAFAATKPSKSPLLILLVSGVAFLLLASAAECYGGGRHDVTRSAVARRSGVGSRRQYVRHRLTGGAVDVPHSDDDGGAGGGKHHRSHKHRVRNWIIGFVVGSLAGVVSGLAMSVLFRMALNCVRGGYRSKSDTVIFIPKLIKSKEHLAFLEKDQDGLASLAVIGRGGCGEVYKAQLPPEREGDAPRFIAIKKIKKRSGDGSGGQNNNLSDEESRQLDKWTRQIQSEIRTVGHIRHRNLLPLAAHVPRPDCHYLVYEFMKNGSLHNALKATTTDTTTNDYNDNNSGEHPPPSPALPWPARLRIAVGIAAGLEYLHVSQRPQIIHRDLKPANILLDDDMEARIADFGLAKAMPDAHTHMTTSNVAGTLGYIAPEYHQTLKFTAKCDVYSFGVILAVLGTGKEPTDKFFAQQVVDDVGIVRWLRRVMQEGDPAAQAGVIDAAIAGAGHDEQILLVLRIAVFCTADDPKDRPTAKDVRCMLSQIKN

SEQ ID NO: 339 - DNA, 3513 bp, Oryza sativa
atggatcatgtagtcgggggcaagttcaagcttggaaagaagatcgggagtggatccttcggggagctcttccttgctgttaatgtgcagactggagaggaagtcgccgtcaaattggaaaatgttaagacgaagcacccacagcttcattatgagtcgaagctgtacatgcttctgcagggaggaactggtattccgcacttgaagtggtttggcgtggagggagagtacaatgtgatggtgatcgatcttcttgggccaagccttgaggacctattcaactattgcagtaggaaattctcgttaaagactgtcctcatgcttgctgatcagatgatcaatcgagttgagtacatgcatcagaagggatttcttcaccgtgatatcaagcctgataatttccttatggggcttggtaggaaagccaatcaggtatatataatagattatgggcttgcgaagaaatatagggaccttcagactcacaagcacatcccatacagagagaacaagaacctcactggaacagctcggtatgcaagtgtcaatacccatcttggtgttgagcaaagcagaagagatgatctagaatctcttggttatgtccttatgtacttccttagaggcagcctaccatggcaggggctgaaagcaggcactaagaagcagaagtacgacaaaataagtgagaaaaagatgcttactcctgtggaggttctttgcaaatcttacccatcagaattcatttcttacttccactactgccgttcattgaggtttgaagacaagccagattattcttacttaaagaggctattccgtgatctctttatccgggagggatatcaatttgattatgtatttgactggaccattttgaaatatccccagataggctccaaaccactgatgaggccaagtgaaagaaccagtggagctgcgggaccttctatggagaagatggaaaaggccccaggtgaagcatctggcagaaggaatcctactggttctttgaatcagagtgacaattatgcacaacggccgtcaatgtcactaaaggaaatcatgcatagcaccgaccggtccggcgaaaggaccgtggaaagaccccgtacatcctcccgtacaggcagtgcatcaaggagagcggttgcgtcaagcagcaggccaggttcatcggtggaaccaatggagcagcaatacagccggacaagcaggttgttctcaagcagtggaagccgtccttccagcacgcagagggttaatccatcggttggagagacaagggccacttctctctcacgagcagccgttgcaagagggtcccgcgacgagcctctccaccgcagcctggagctgctgtcccttggtggcgttaatgaggaaatatttttggcctgggctccaagaacgcacttacgtgggccgattgttgcgctggccaacctcatccccgaagatgacgccgtcgacgagctcgacagctacatgtatcaaactatgaaatttgatgcaatttcattgattggacttgcttgtagggagcagggtcttaaatataatgttaccacaggcgatgaagtggaggatatgtttgcgctcttgagcgaggttaaaaggcaaatcccatccatcactgcagtgtcttcaggcgccattgcgtctgattatcagaggcttcgtgttgagagtgtctgctcaaggttgggcctggtatcgctggcgtatttgtggaagcaggatcagactttgcttcttgatgaaatgataagaaggggcatagtagctataatcgtcaaggttgccgcaatggggctcaaaccttctgctcacttagggaaagaactggctgaacttaagtgtcatctgctccaactgaatgagagttatggaatcaatgtctgtggtgaaggtggcgaatatgaaacactaactcttgactgccctctattccgtaatgcaagaattgttcttgatgattttgaagttatactccactcgcctgattccatcgctccagtaggaattcttcacccgttaaaatttcatcttgaacacaagccaaattcttttggcaccgttggtgatagtgctattgcccaagagaattctagttatttgtatgaagtagatggagctattgcacacagtgatgtcgaaaagaaacaagagaccttgagtccagttacaactgttgatgcttgcacaaatatagacctatgcatctcaaagactggcaaaaagttgttctccattggttgttggattcaggatccctgtggtacttcagaaggcctgaagacagatctagtagcagttttgagcagaatcgagaatcagctcaaggaagaagggttaggttggatgaatgttctgtatgttcacctcttcatttcaagcatgaaggaatttggattggccaatgaagtttatgtgagctttattactgaacaaaaatgccctctgggtgttccttcacgtagtacagttgaattgccactagttcaggttggtttaggccatgcatatgtggaagttctagttacaaaggagcaagtcaagagagttctacatgtacaaagcatttcatgctgggctcctagttgcatcggaccttatagccaggcaacacttcatggagagattctctatatggctggtcagctggggcttgatccccctacgatgaagctctgtcctgggggcccaacggctgaactagaattcgcattacgaaacagtgaagctgttgctaatgcctttggttgctccattttttcttcggcaatacactttctggtgtactgttctgcacacttgacgtccagtgaaaaagaacaagttgaacatacacttcgtagttcgtacatcaccagtttggattgctcaaataccggatcatatcccaccattctctatgtatttgcatcagatcttccaaaaggagcatacgtggagataaaaccaatattgtatgtccccagtcccactaatgatgatggagtcccaaccagagaacaggaggctggagggtcattgccagcatcaagcgaagcttttagtgcctggagcgcacaatactctgacctggatgattcatgctgccaggtgcacacaatcggtgggaaaatttgctctgctgttgtttcagtcacaaatgatattgcattgaaaatctgttctacaactgaacaactataccactcggaggagcatttgaaagctttggctagattttgtgcattccagcttgctaagattctgatagataatggcttttcctgggacaacctaacgatgttaagattctactattcagtagagcacccagtgactgcggatgtgatgtcccgtgtattttctgaggcattcgccgagcttgaagaaggtggtgttggttcctgcacacctgatggggttcctattttcaacatcgtgccagtgtcggcatctggttgcttcacatcgttaagcgacattatatcatgcgagctattagcttcgaaagtttaa

SEQ ID NO: 340 - protein, 1170 aa, Oryza sativa
MDHVVGGKFKLGKKIGSGSFGELFLAVNVQTGEEVAVKLENVKTKHPQLHYESKLYMLLQGGTGIPHLKWFGVEGEYNVMVIDLLGPSLEDLFNYCSRKFSLKTVLMLADQMINRVEYMHQKGFLHRDIKPDNFLMGLGRKANQVYIIDYGLAKKYRDLQTHKHIPYRENKNLTGTARYASVNTHLGVEQSRRDDLESLGYVLMYFLRGSLPWQGLKAGTKKQKYDKISEKKMLTPVEVLCKSYPSEFISYFHYCRSLRFEDKPDYSYLKRLFRDLFIREGYQFDYVFDWTILKYPQIGSKPLMRPSERTSGAAGPSMEKMEKAPGEASGRRNPTGSLNQSDNYAQRPSMSLKEIMHSTDRSGERTVERPRTSSRTGSASRRAVASSSRPGSSVEPMEQQYSRTSRLFSSSGSRPSSTQRVNPSVGETRATSLSRAAVARGSRDEPLHRSLELLSLGGVNEEIFLAWAPRTHLRGPIVALANLIPEDDAVDELDSYMYQTMKFDAISLIGLACREQGLKYNVTTGDEVEDMFALLSEVKRQIPSITAVSSGAIASDYQRLRVESVCSRLGLVSLAYLWKQDQTLLLDEMIRRGIVAIIVKVAAMGLKPSAHLGKELAELKCHLLQLNESYGINVCGEGGEYETLTLDCPLFRNARIVLDDFEVILHSPDSIAPVGILHPLKFHLEHKPNSFGTVGDSAIAQENSSYLYEVDGAIAHSDVEKKQETLSPVTTVDACTNIDLCISKTGKKLFSIGCWIQDPCGTSEGLKTDLVAVLSRIENQLKEEGLGWMNVLYVHLFISSMKEFGLANEVYVSFITEQKCPLGVPSRSTVELPLVQVGLGHAYVEVLVTKEQVKRVLHVQSISCWAPSCIGPYSQATLHGEILYMAGQLGLDPPTMKLCPGGPTAELEFALRNSEAVANAFGCSIFSSAIHFLVYCSAHLTSSEKEQVEHTLRSSYITSLDCSNTGSYPTILYVFASDLPKGAYVEIKPILYVPSPTNDDGVPTREQEAGGSLPASSEAFSAWSAQYSDLDDSCCQVHTIGGKICSAVVSVTNDIALKICSTTEQLYHSEEHLKALARFCAFQLAKILIDNGFSWDNLTMLRFYYSVEHPVTADVMSRVFSEAFAELEEGGVGSCTPDGVPIFNIVPVSASGCFTSLSDIISCELLASKV

SEQ ID NO: 341 - DNA, 855 bp, Oryza sativa
atcgtgcattctgacgagtcgtacgtgcatcctgacacggcgtcgatcgttcgaatatataaacacagctgcgctctacgccaacaactaactgtccgtgtgcgagttgcgaccttgctggaaaacttgtacctagagctagctgaaggaagcaatatggccaccgtggatggcacaacggcgccgagctccggcggcaagacggcgacggtggcgttggagtcgggcggcggccgctacggtgggccggctccggcgaaatgctccggcgccaacctggccctgagggcgctgctcttcgccgtgtcgctgtccgcgctcgtggtgcttgtcaccgccaagcagacggtgatggtcccgttcgtcatccggccgccgcagttcatcctcgcgccggtccccgccaagtacacgcactcaccggcgctcatatatctgctggctgcgctgtgcgcgacgtgcttttacagcctgatcacggccatcagctcggtgaggttgctctccagctcggcttgctctgccaagacgctcttctacctcatcctgcttgatgtgggatggaatttttatatttctgaccaatttatttttgctcttgtgtgcaaattcgtggcagttctacgcagccgtgatggcgtcggcgaccgggacagcgggggccgtggcgtgggtgggactgaaggggaactcccacacccggtggaacaagatatgcaacgtctacggcaagttctgccgccacatcggcagctccaccttcctcgccctcatcgccgccatcgttctcgtcctcctcgccttcctcaacgcctactccctctaccgccgaagccgttgattcattccccatga

SEQ ID NO: 342 - protein, 284 aa, Oryza sativa
IVHSDESYVHPDTASIVRIYKHSCALRQQLTVRVRVATLLENLYLELAEGSNMATVDGTTAPSSGGKTATVALESGGGRYGGPAPAKCSGANLALRALLFAVSLSALVVLVTAKQTVMVPFVIRPPQFILAPVPAKYTHSPALIYLLAALCATCFYSLITAISSVRLLSSSACSAKTLFYLILLDVGWNFYISDQFIFALVCKFVAVLRSRDGVGDRDSGGRGVGGTEGELPHPVEQDMQRLRQVLPPHRQLHLPRPHRRHRSRPPRLPQRLLPLPPKPLIHSP

SEQ ID NO: 343 - DNA, 471 bp, Oryza sativa
  misc_feature (96)..(97): n = any nucleotide
  misc_feature (99)..(100): n = any nucleotide
  misc_feature (102)..(102): n = any nucleotide
  misc_feature (105)..(106): n = any nucleotide
atggcgtcaccggccggccaccgttcaccggcggcaacgccgccggcgacggcgacggcgacggcgtggtgctactccgcagggggggcggggggnngnngnctnnaccttgacggcgagcttcatcccggcggcgcaatgtccagggaagccgcagatgaagtaccgcgtgccaacggcggcgagcgggacggtgtcatcgccggagttgaaggtggcgatggggctcgccgccgagcaggcgtcgtagccggccttggtcacctccacgacgtcgtgcgccgccggcgagtacctgaacacgagccggtcaccggcgcggaaggtggcggcggacgcccactgcgcgtagttggtgcgcgtgtcccacgacccggccggtgctcccaccgtgtaggtggtggcgcccatcgccgtcgtcgcgagcaccgccgccgccgccgccacggccacgacgaggagagctctggc

SEQ ID NO: 344 - protein, 157 aa, Oryza sativa; identical to SEQ ID NO: 10
  X_region (33)..(34): Xaa = any naturally occuring amino acid
  X_region (36)..(36): Xaa = any naturally occuring amino acid

SEQ ID NO: 345 - DNA, 528 bp, Oryza sativa
atggcaccttccaaggtcagcctcgccgccgtgctcgccgtggccatctcgctggccatggcggccaccaccaccacctcggcgcagaacacgccgcaggactacgtcaacctgcacaacagcgcgcggcgcgcggacggcgtcggcccggtgagctgggaccccaaggtcgccagcttcgcgcagagctacgcggccaagcgcgccggcgactgccggctgcagcactccggcgggccgtacggcgagaacatcttctggggctcggcggggcgcgcctggagcgccgccgacgcggtggcgtcgtgggtgggcgagaagaagaactaccactacgacaccaacacgtgcgacccgggcaaggtgtgcggccactacacccaggtggtgtggcgcaagtcggtgcgcatcggctgcgcccgcgtcgtgtgcgcggcgaaccgcggcgtgttcatcacctgcaactacgaccccccgggcaacttcaacggcgagcgcccgttcctcaccctcgacgccgcggccaag

SEQ ID NO: 346 - protein, 176 aa, Oryza sativa; identical to SEQ ID NO: 86

SEQ ID NO: 347 - DNA, 498 bp, Oryza sativa
atggagagcgccatgttcgggctggagacgccgctgatgacggcgctgcagcacctgctcgacatccccgacggcgagggcggcgccgccgggaagcagggcgcgaccggtggcccgacgcgtgcgtacgtgcgcgacgcccgcgccatggcggcgacccccgccgacgtgaaggatctgcccggggcgtacgcgttcgtggtggacatgcctgggctcaagtcctccgacatcaaggtgcaggtggaggaggagaggctgctggtgatcagcggggagcggcggcgcggcggcggggaggaggagaaggaggagtcgtgcaagtacctgcggatggagcggcggatgggcaagttcatgcgcaagttcgtgctccccgacaacgccgacgtcgacaagatctccgccgtgtgccaggacggcgtgctcaccgtcaccgtcgagaagctcccgccgccggagcccaagaagcccaagaccatcgaggtcaaggtcgcg

SEQ ID NO: 348 - protein, 166 aa, Oryza sativa; identical to SEQ ID NO: 90

SEQ ID NO: 349 - DNA, 1947 bp, Oryza sativa
atggcgggcaagggcgagggtccggccatcggcatcgaccttggcacgacctactcgtgcgtgggcgtttggcagcacgaccgcgtggagatcatcgccaacgaccagggcaaccgcaccaccccctcctacgtcggcttcaccgactccgagaggctcatcggagatgctgccaagaaccaggtcgccatgaaccccatcaacaccgtctttgatgccaagcgtctcattggcaggaggtttagcgatgcttctgttcagagtgacattaagctctggcccttcaaggtgattgctggacctggtgacaagcctatgattgttgtccagtacaagggtgaggagaagcagtttgctgcagaagagatctcctccatggtcctcatcaagatgcgtgagattgctgaggcctaccttggcaccaccatcaagaatgccgttgtcactgttcctgcctacttcaatgactcccagaggcaggccaccaaggatgctggagtgattgctggtctcaatgtcatgcgtatcatcaacgagccgactgctgcagctattgcctatggtcttgataagaaggccaccagcgttggtgagaagaatgtcctcatctttgaccttggaggtggtacctttgatgtctccctccttaccattgaggagggtatctttgaggtcaaggccacagctggtgacacccatcttggtggtgaagattttgacaatcgtatggtcaaccactttgtgcaagaattcaagaggaagaacaagaaggatatcactggcaaccccagggctctcaggaggttgaggacagcttgtgagagggcaaagaggaccctgtcctccactgcccagaccaccattgagatcgattccctgtatgagggcatcgacttctactcaaccatcacccgtgccaggtttgaggagctcaacatggatctcttcaggaagtgtatggagcctgtggagaagtgcctcagggatgctaagatggacaagagctctgttcatgatgttgtccttgttggtggctccactaggatcccgagggtgcagcagctcctgcaggatttcttcaacggcaaggagctttgcaagaacatcaacccagatgaggctgttgcttatggtgctgctgtccaggctgccatcttgagtggtgagggcaacgagaaggtccaggacctcctcctgttggatgttacccctctctctctcggtttggagactgctggtggtgtcatgaccgttttgatcccaaggaacaccaccattcccaccaagaaggagcaggtcttctccacctactccgacaaccagcctggtgtgctcatccaggtttatgagggtgagaggaccaggacacgtgacaacaacctgctggggaagtttgagctctctggaatccctcctgctcccaggggtgttccacagatcactgtttgcttcgacattgatgccaatggtatcctgaacgtgtctgctgaggacaagaccaccgggcagaagaacaagatcaccattaccaacgacaagggcaggcttagcaaggaggagattgagaagatggtccaggaggccgagaagtacaagtcagaggatgaggagcacaagaagaaggtggagtccaagaacgcgctggagaactacgcctacaacatgcgcaacaccatcaaggatgagaagatcgcctcgaagctcccggcagcggacaagaagaagatcgaggatgccatcgaccaggccatccagtggctggacggcaaccagctcgctgaggctgatgagttcgatgacaagatgaaggagctggagggcatctgcaaccccatcatcgccaagatgtaccagggcgctggcgcggacatggccggcggcatggacgaggacgatgctcccccggctggcggcagcggtgctggccccaagatcgaggaggtcgac

SEQ ID NO: 350 - protein, 649 aa, Oryza sativa; identical to SEQ ID NO: 214

SEQ ID NO: 351 - DNA, 462 bp, Oryza sativa
atgcagtacggctcgatcgggtggtccgtcggcgccacgctcggctacgcccaggcggccaaggacaagcgcgtcatctcctgcatcggtgacggtagcttccagatgacggcgcaggacgtgtcgacgatgttgcggtgcgggcagaagagcatcatcttcctcatcaataatggtgggtacaccatcgaggtggagatccacgacgggccgtacaacgtcatcaagaactgggactacaccggcctcatcgacgccatccacaactctgacggcaactgctggacaaagaaggtccggactgaggaggagctgatagaggcgatcgcgacggcaacgggcgccaagaaagattgcctctgcttcatcgagatcatcgtgcacaaggatgacacgagcaaagagcttctcgagtggggatccagggtatcggctgccaacagcaggccgccgaatccccag

SEQ ID NO: 352 - protein, 154 aa, Oryza sativa; identical to SEQ ID NO: 96

SEQ ID NO: 353 - DNA, 696 bp, Oryza sativa
atggcgccttccctcgccacctcttccaccctcgctctcttcctcctcgtcgccgtctccatcgccgacgccgcgacattcgccatcaccaacaggtgccagtacacggtgtggccggcggcggtgccatcgggcggcggcacgaagctcgacccggggcagacgtggaccatcaacgtgccggccgggacgacgggcgggcgcgtgtgggcgcgcacgggctgcggtttcgacggcagcggcaacgggcagtgccagacgggcgactgcggcgggaagctgcggtgcacggcgtacggcgcggcgcccaacaccctggccgagttcgcgctgaaccagtggaacaacctcgacttcttcgacatctccctcatcgacggcttcaacgtgcccatggccttcctccccgccggcagcggcgccgggtgccccaaaggcgggccgcggtgcgccacggccatcacgccgcagtgccccagcgagctgagggcgcccggcgggtgcaacaacgcgtgcacggtgttcaggcaggacaggtactgctgcaccggatcggcggccaacagctgcggcccgaccaactactcggagttcttcaagcggctgtgcccggacgcctacagctaccccaaggacgacgcctccagcacctacacttgcccggccggcaccaactaccaggtcgtcttctgccca

SEQ ID NO: 354 - protein, 232 aa, Oryza sativa; identical to SEQ ID NO: 110

SEQ ID NO: 355 - DNA, 648 bp, Oryza sativa
atggcgagggtacagctctgggtggccgccgcgtgcgccgtcgtgctcgcgctcgccgcgccctcgctcgccggcgaccccgacatgctccaggacgtctgcgtcgccgacttggcgtccccggtgaagctgaacgggttcccgtgcaaggcgaacgtgacggcggacgacttcttcttcgcggggctgaagaaccccggcaacaccaacaacccggcggggtcgaacgtgacggcggcgaacgtgcagtcgttcccgggggtgaacacgctgggcgtgtctatggcgaggatcgactacgcgccggggggacagaacccgccgcacacgcacccgcgcgccaccgagatcatcttcgtcctcgagggcgtcctcgaggtgggcttcatcaccactgccaacaagctcttcaccaagactgtcaccgccggcgaggtttttgtttttccgcgcggccttgtccacttccagcagaaccgcggccacggccccgccgccgtcattgccgccttcaacagccagctccagggcacccaggccattgccgccacgctttttgccgccgcgccgcccgtgccgtccgacgtcctcgccaaggccttccgcgtcgacgtcccgcaggtggacgccatcaaggccaagttcaag

SEQ ID NO: 356 - protein, 216 aa, Oryza sativa; identical to SEQ ID NO: 2

SEQ ID NO: 357 - DNA, 561 bp, Oryza sativa
atggcggaccagctctccgaagagcagattggagagttcagggaggccttcagcctcttcgacaaggacggcgacggttctatcaccaccaaggagctaggaaccgtgatgcgaagtctagggcagaacccaacggaggcggagctgcaggacatgatcagcgaggtggacacggacagcaacggcaacatcgaattcaaggagttcctgggcctgatggcgcgcaagctgagggacaaggactccgaggaggagctgaaggaggcattccgcgtcttcgacaaggaccagaacggtttcatctctgccaccgagctccgccacgtgatggccaacatcggggagcggctcaccgacgaggaggtcggcgagatgatcagcgaggccgacgtcgacggcgacgggcagatcaactacgaggagttcgtcaagtgcatgatggccaagaagaggaggaagaggatagaggagaagagggaccacgacggcggcagcaggacgaagagtgcagggccctccgccgcgccggcgagcaagcgtggccagaagtgcgtgatcctg

SEQ ID NO: 358 - protein, 187 aa, Oryza sativa; identical to SEQ ID NO: 4

SEQ ID NO: 359 - DNA, 993 bp, Oryza sativa
atggaggcgcgaggaagcagaggaatgcggctgtggctcctgtccgtggcggtgatggccatggcgatggcgacgaggtcgcaggcgcagctgcaggtcgggtactacgacacgctgtgcccggcggcggagatcatcgtgcaggaggaggtcagcaaggcggtgtccgggaaccccggcatggccgccggcctcgtccgtctccacttccacgactgcttcgtcagggggtgcgacgcgtcggtgctgctggactcgacgcaggggaacagggcggagaaggacgcgcccccgaacacgagcctccgcggcttcgaggtcatcgacagcgccaagtcccgcctcgagacggcctgcttcggcgtcgtctcctgcgccgacgtcctcgccttcgccgcccgggacgccctcgcgctggtgggagggaacgcgtaccaggtgccgggggggaggagagacggcaacgtgtcggtggcgcaggagacgaacgggaacctgccgccgccgtcggcgaacgtggcgcagctgaaccagatgttcggcgccaaggggctcacccaggcggaaatggtggcactgtcgggcgcgcacaccatcggcgtgtcgcactgcagctccttcagcaaccgcctctactcgtcgggccccaacgccgggcaggaccccagcatggaccccagctacgtcgccgcgctgacgacgcagtgcccgcagcagcaggggcagcccgcggcggggatggtgcccatggacgccgtcacgcccaacgcctttgacaccaactactacgccgccattgtcgctaaccggggattggtcagctccgaccaggcgctcctcgccgaccagaccaccgccgcgcaggtcgtcgggtacaccaacaacccggactcgttccagaccgacttcgccgccgccatggtcaagatgggctccatcggcgtgctcaccggcaacgccggcaccatcaggacaaactgcagggtggccagc

SEQ ID NO: 360 - protein, 331 aa, Oryza sativa; identical to SEQ ID NO: 16

SEQ ID NO: 361 - DNA, 1026 bp, Oryza sativa
atgtgtggaggatccattctcggcgaccttcacttgccggtgcggcggacagtgaacgccggtgacctgtggggagacgccggcaagggtagagatggtggcgacggcttgaagaagaggaaggggagttcttgggatttcgatgttgattgcgatgatgatgatgatgatgactttgaggctgattttgaggagtttgaggatgactatggcgatgatgatgatgtgggtttcggggacgacgaccaagaatccgacatgaacggtctcaagctcgccggattcagcaccacgaagctcggcctcggcggcagcaggaagaggaagacgcgataccgagggatccggcagcggccatgggggaaatgggcggcggagatcagggacccccgcaagggcgtccgcgtctggctcggcacgttcggcaccgccgaggaggccgccatggcgtacgacgtcgaggcacgccgcatccgcggcaagaaagccaaggtcaacttccccgacgccgccgccgccgccccgaagcggccacggcgttcttcggcgaagcattcgccgcagcagcagaaggccaggtcgtcgtcgtcgtcgccggcgagcctgaacgccagcgacgccgtgtccaagtccaacaacaaccgcgtcagctcggctgggagcagcaccgacgccaccgccgccgccatcgccatcgacgacggcgtcaagctcgagctgctctcggagacggatccttctccgcccatggccgccgccgccgccgcgtggctcgacgcgttcgagctgaacgatcttgacggatcaagatgcaaggacaacgcattcgatcaccagattcacaaggtagaagcggctgtcgctgatgaattcgcgttctacgacgatccgagctacatgcagctgggttaccagctcgatcagggcaactcgtacgagaacatcgacgcgctcttcggcggcgaggccgtcaacattggtggactctggagcttcgacgacatgccaatggagttcagagcttat

SEQ ID NO: 362 - protein, 342 aa, Oryza sativa; identical to SEQ ID NO: 22

SEQ ID NO: 363 - DNA, 399 bp, Oryza sativa
atggcgtccaaggcgttcgctctgttcctggccgtgaacctcgtcgtgctcggggtggcaagcgcctgcggcggcagcccgtcgtgcccgacgccgacgccgtcgaccccgacaccgtcaacgccgacgccgacgccgtcggcgttcgggaggtgcccccgcgacgcgctgaagctgggcgtgtgcgccaacgtgctgggcctgatcaaggccaaggtgggcgtgcctccggcggagccgtgctgcccgctgctggaggggctcgtcgacctcgaggcggcggtgtgcctctgcacggccatcaggggcaacatcctcggaatcaacctcaacctccccatcgacctcagcctcatcctcaactactgcggcaagaccgtccccaccggcttcaagtgc

SEQ ID NO: 364 - protein, 133 aa, Oryza sativa; identical to SEQ ID NO: 26

SEQ ID NO: 365 - DNA, 774 bp, Oryza sativa
atgttggccatattccagaagcaggtggcgcacgcgccggcggagctgaacagcccgcggagcagcgcggcgaagcccaagaaccccgacgagatcctcagggacttccacgccctccaccccatcgaggccttctccacctccttcggcggcggcgccgccctcgcctgcgtcgccggccacgcccgcaatggcctctctggctacgagaggatgttctgtgggctggatgacatctactgcgtgttcatggggaggctggacaacctgagcagcctgatccggcagtacgggctgtgcagccgctccaccaacgaggcgctgctcgtcatcgaggcctaccgcaccctccgcgaccgcggcccctaccccgccgaccaggtcgtcaaggatctctccggctccttcgccttcgtcgtcttcgacaacaagtccggcgccgtcttcgccgccctgagtacggatggggaggtgccgttgtattgggggatcgcggcggatgggtcggtggtgatctgcgacgagagggagatcgtgaagggagggtgcggcaagtcgtacgcgccgttcccggtggggtgcatgttccacagcgagggggggctcaagagcttcgagcacccgatgaaccggctgaaggcgatgccgcgggtggacagcgagggcgtcatgtgcggcgccaccttcaaggtcgacaccttcaccaagatcaactccatgccccgcgtcggcagcgccaccaactgggccgccacctgggacgacgctgccgcc

SEQ ID NO: 366 - protein, 258 aa, Oryza sativa
MLAIFQKQVAHAPAELNSPRSSAAKPKNPDEILRDFHALHPIEAFSTSFGGGAALACVAGHARNGLSGYERMFCGLDDIYCVFMGRLDNLSSLIRQYGLCSRSTNEALLVIEAYRTLRDRGPYPADQVVKDLSGSFAFVVFDNKSGAVFAALSTDGEVPLYWGIAADGSVVICDEREIVKGGCGKSYAPFPVGCMFHSEGGLKSFEHPMNRLKAMPRVDSEGVMCGATFKVDTFTKINSMPRVGSATNWAATWDDAAA

SEQ ID NO: 367 - DNA, 2157 bp, Oryza sativa
atggcggcctgggcatggccgctcgtcttcctcgtctcgtgctgctgttcttggacccagcggcgaatcttggttgctgcgaccactgacgccaatgatgttactgtcctcaatgcgctattcaccagcctcaattcgccggggcagctgcgcggttggcaggtgaatggcggtgacccatgtggcgcctcatggcagggcatcacctgctctggatcatcagtcacagcaattaaattgccgagcttggggctttcggggaatctggcctacaatatgaacaccatggagtccctagttgagcttgacatgagccaaaataatcttgggggtggccaaaatattcaatacaatcttccaaataagaagcttgagaggctcaatcttgctgggaaccagtttgctggaaatgtgccatactcaatttccacaatgcctaaacttaagtatctaaaccttaatcataaccaattacaaggaaatatgacagatgtcttttccaaccttccaagtttatcaacacttgatctctccttaaattctcttactggtgatctcccacaaagtttcacttctctgtcaagcctgaaaactttgtatctgcagaacaaccaatttactggatcaatcaatgtccttgctaatcttcccctggataatttaaatgtgggaaacaaccgttttactggttggattcctaatgagctaaagaaaataaatagtcttcaaaccgatggcaattcttggagcacaggtccggcaccaccaccaccaccattcacagcacctccaccatcacgcaaccgtaaaaaaagcccaggcagacactccaatggcagtggtagctcatcaagttctggtggaaattcagggttacgtgctggagctatagcaggaattatcgtagctctactggtcattggagcagttgtagcattcttcttgataaagagaaaacgcaaaggtacaaggcaagaacatgttgaacagcgacagcctttcaattcatacccttccaatgaagttaaagatgtgaagcctataccagaatccaccaagatagaggtggagcctttgccttcccctgtggccgttagtctaaaaccacctcctaagattgagcgcaaccagtcatttgatgacgatgatgatgacttttcaaacaagcctgttgcaaagaaaagtaattcagcatcagtaaaagcaacagtttattcagttgcagacctacagatggcaacagatagtttcaacatggacaatcttgttggagagggtacttttggacgtgtttacagggcacaattcagtgatggaaaggtactagctgtcaagaaactaaacagtactgtgttgccaagccaatcttcagacgatttctttgacttggtgtcaaacatttcaaagttgcaccatcccaatctcaatgagcttgtgggctattgcatggagcatggacagcacttgctagtttatgatttccacagaaatggttcgctgcatgatatgcttcacctcccagatgaatatagcaaaccactcagctggaattctcgtgttaagattgcgttaggttctgcacgggcactagagtatcttcatgaaatttgttctccttctattatccacaagaacttcaagtcatctaatatcttgctggacaccgagttcaatcctcatgtttctgatgctggacttgccagcagtgttcctgattctgaattccaggcttcagatcagggttctggatatagtgcccctgaagttgacatgactgggcagtataccctcaagagtgatgtttatagctttggagttgtcatgctggagctcttgacaggccgcaaaccatttgacagcgctagactccggacagagcagtcacttgtccggtgggcaacgccccagctgcatgacatcgatgcgttggaccggatggtcgacccagcgctcaagggcctgtaccctgccaaatccctgtcccgtttcgcagacgtcattgcgctgtgtgtccagcctgagccggagttcagaccgccgatgtctgaggtggtgcaagcgctggtccgccttgttcagagggccaacatgactaggagaatgatcgacggcgaagagggttctcgaagaccagatgaccaggaccaggagttcgtg

SEQ ID NO: 368 - protein, 719 aa, Oryza sativa; identical to SEQ ID NO: 40

SEQ ID NO: 369 - DNA, 999 bp, Oryza sativa
atgggcgctgtggctgcggttcgtgccgcggtcctggtcgtggccgtggccctcgccgcggcggcggccggcgcgtcggcgcagctgtgcgacaagtactacgacgggacgtgcccggacgtgcaccggatcgtgcggcgcgtgctgaagagggcgcggcaggacgacccccgcatcttcgccagcctcacccgcctccacttccacgactgcttcgtccagggttgcgacgcgtcgatcctgctggacaacagcacgagcatcgtgtcggagaagttcgcgacgccgaacaacaactcggcgcgggggtacccggtggtggacgacatcaaggcggcacttgaggaggcctgccccggcgtcgtctcctgcgccgacatcctcgccatcgccgccaagatctccgtcgaactgtccggaggcccccggtggcgcgtgcccctcggccggcgcgacggcaccacggccaacctcaccggcgccgacaataacctccccagcccccgcgacaacctcaccacccttcagcagaagttcgccgccgtcggcctcgacgtcaccgacctcgtcgccctctcaggggcgcacacgttcgggagggtgcagtgccagttcgtgacggacaggctgtacaacttcagcgggacggggaagccggacccgacgctggacgccggctaccggcgggcgctggcgaagagctgcccgcggcggggcgggaactcgtcggcgctgaacgacctggacccgaccacgccggacgccttcgacaagaactacttcgccaacatcgaggtgaaccgcggcttcctccagtccgaccaggagctcctgtccacgccgggcgcgcccacggcggcgatcgtcaacagcttcgccatcagccagaaggccttcttcaagagcttcgccaggtccatggtcaacatggggaacatccagccgctgacgggcagccagggggaggtccggaagagctgcagatttgtcaatggaagt

SEQ ID NO: 370 - protein, 333 aa, Oryza sativa; identical to SEQ ID NO: 18

SEQ ID NO: 371 - DNA, 573 bp, Oryza sativa
atgcctgccatggccaagcccgcctcccgcgctgccaagcccgcgtcggcgccgaagaagcagaaggcaaagccctccgccgccgccggtggctcctcccacccgccttatttcgagatgatcaaggaggcgatcacggtgcttaaggagaggaccggctcgagcgcgcacgccatcgccaagtacatggaggagaagcacggggcgtcgctgccggccaactacaagaagatgctctccatccagctgcgcgggttcgcttccaagggcaagctcgtcaaggttaaggcctcctacaagctctccgacgccgccaaggactcgcccaaggccaagcctgccgcccccgcccccaaggcagcagcgccgaagccagcgaaggacgccgccaaacccaagaaggacgccgccgctgccaaacccaagaaggcccccgccgctggcaccaagcgcaaggcgccggagaagaaggtggtcgccaagcccaagaagtctccggcggcgaaggcgaaggccaagcccaagaccgtccggtcgccggccgcgaagaagacccgcaaggcacctgcagct

SEQ ID NO: 372 - protein, 191 aa, Oryza sativa; identical to SEQ ID NO: 92

SEQ ID NO: 373 - DNA, 642 bp, Oryza sativa
  misc_feature (547)..(547): n = any nucleotide
atggctgacgatttgggccctcccactgtgctccagaagatacatgggcagtccatgatgttcagcaagatctcaccttattctttgatgaagaatcccgcactctacaatgccaacacttcttacagtgtgcctctgaagtcatacaatgggatggatgggaacaatgggttctcatctgtcacatctgtatccccagtctttgcttctgccccaaaggagaaaggtctttctgggtttatgattgacttcatgatgggtggagtttcagctgctgtctccaagactgctgctgctcccattgagcgaatcaagcttctcattcaaaaccaggatgaaatgatcaagagtggtaggctctctcacccatacaaaggtattgcggactgctttggccgcacaattaaggatgaaggtgtgattgcactgtggagagggaacactgctaatgtcatccgttactttcctacccaggccttgaactttgccttcaaagaccatttcaagcgcatgttcaactttaagaaggacaaggatggttactggnaagtggtttgctggaaacctggcttctggaggagctgctgggggcttgctctctcttctttggggattctctggatatgctcgtactcgtctggc

SEQ ID NO: 374 - protein, 214 aa, Oryza sativa; identical to SEQ ID NO: 28
  X_region (183)..(183): Xaa = any naturally occuring amino acid

SEQ ID NO: 375 - DNA, 1047 bp, Oryza sativa
atgagggagctgctcggctccttcaccaacgacgtcctgtgccgcgccgtgtgcgggaagtcgtcgttccggcgagaaggccggaacaagctgttcatggagctcgccgccggcaacgctgatcagtacgctggcttcaacctggaagactacttcccgagcttggcgaaggtggatctgctgaggcgagtggtgagcgccgacaccaagaagctcaaagagaagtgggacagtgttcttggtgacatcgtaagcgagcatgaaaagaaatcgtcgctgcgtcgtgacgatcaagtacagatggatgatgaccgtgatgatgatcaggaggagcaagagtcagatttcgttgatattctgctcgatcgtcaacaggagtacaatctaaccaggcacaatatccatgccatattgatggacatgtttgcagcggggacggacacttcatatatagcccttgaatttgctatgtccgagctcataagaaaaccacatctcatgaccaaactacaagatgaagttaggaagaacacacctacccaaatggtaagtgaagatgacttgaacaatatgccctacctaaaagccgtcgtaaaggagacacttcggttgcatccaccagttccgctcctcctaccgcgcctcttcatggctcagtgcaatgccaatggttatacaatcccagccaacacacgtgtcatcatcaatgtttgggctcttggcagagatgctaaatgttgggagaattcagaagagttcatgccagagaggtttatggatagtggagacactatagataatgttgatttcaagggaaccgactttcagtttctcccatttggagctggacgaaggatttgtcctgggatgaattttgggatggcctctgttgagctcatgctatcaaaccttatgtattgctttgactgggagctcccggttggaatggacaaagatgatgtcgatatgacagatcagttcgcacttacaatggcgcgaaaagagaaactctacctcatcccgagatcacacgttatcaagatcaca

SEQ ID NO: 376 - protein, 349 aa, Oryza sativa; identical to SEQ ID NO: 32

SEQ ID NO: 377 - DNA, 954 bp, Oryza sativa
  misc_feature (630)..(630): n = any nucleotide
atgggaggtgcccacggtgtctgctatggcgttgtcggcaacaacctcccgtcgcggagcgaggtcgtgcagctgtacaagtcgaaaggcatcagcgcgatgcgcatctactacccggaccaggaagccctcgccgcgctccgcggcagcggcatcgccgtcatcgtcgacgtcggcgacaagggcgcggtggccaacctcgccaacaacccctccgccgccgccgactgggtccggaacaacgtccaggcctactggccgagcgtcttcatccggtacatcgccgtcggcaacgagctcggccccggcgacatggggaccatcctcccggccatgcagaacttgtacaacgcgctcgtgtccgccggcctctcgaacagcatcaaggtgtcgacggcggtgaagatggacgtgatcaccaactcgttccctccgtcgcacggcgtgttccgccccgaccttcagcggttcattgtgcccatcgcgcagttcctcgccaacaccatgtcgccgctgctcgtcaacgtgtacccctacttcgcctacagggacaacccgcgcgacatcccgctcaactacgccacgttccagccgggcaccacggtgagggacaacgacagcggcctcacntacaccaacctcttcagcgccatggtggacgccgtgtacgccgcgctggagaaggccggcgcgcccggcgtccgcgtcgtcgtgtcggagagcgggtggccgtcggcgggagggttcgcggcgaacgtggagaacgcgaggaatcacaaccagggcgtgatcgacaacgtcaagaacgggacgccgaagcggcccgggcagctggagacgtacgtgttcgccatgttcaacgagaaccagaagcccggggatgagaccgagaggcattttgggctcttcaatcctgacaagacgccggtctacccgattacgtttcctccgaac

SEQ ID NO: 378 - protein, 318 aa, Oryza sativa; identical to SEQ ID NO: 38

SEQ ID NO: 379 - DNA, 450 bp, Oryza sativa
atggccaagccaagcgccgctccggtgaccggcgtccccgtcggctccgccgcctggtccaccggcctctgcgactgcttcgacgactgcggcctatgctgcttgacgtgctggtgcccgtgcatcacgttcgggagggtggcggagatggtggacaggggctcgacgtcgtgcggcaccggcggcgcgctgtacgggctgctgtgcgcgttcaccgggtgccagtggatctactcctgcacctaccggggcaagatgcgcactcagtacgggctcgccgaagccggctgcgccgactgctgcgtccacttctgctgcgagccatgcgcgctgtgccaggagtaccgcgagctcgtcgcccgcggctacgaccccaagctcggctggcacctcaacgccgaccgcgccgccgccgccggcgccgctcccgccgtgcagtacatgggccgc

SEQ ID NO: 380 - protein, 150 aa, Oryza sativa; identical to SEQ ID NO: 30

SEQ ID NO: 381 - DNA, 1806 bp, Oryza sativa
atgtgctctgggccgcgcaagccgtccacaccgccgctgccgcagcagcagaaggaggcgacggtgatggcggcgtccttgcttcttgagctggcggcagcggacgacgtggcggcggtgaggagggtcgtggaggaggagaaggtgtctcttggcgtggctgggttgtggtatgggccttcggcgagcggcgtggcgaggctcgggatggagcggaggacggcggcgatggtggcggcgctgtacgggagcacgggggtgcttgggtatgtcgtggcggcagcgccggcggaggccgcgcgcgcgtcggagacggatggggccacgccgctgcacatggcggctgccggtggcgcggcgaacgcggtcgcggccacgcgcctgttgctcgccgcgggggcgtcggtcgacgcgctctcggcttcggggctccgcgccggtgacctcctcccgcgcgccaccgcggcggagaaggccatccggctgctgctcaagtcgccggccgtgtcgccgtcgtcgtcgccgaagaagtcggcctcgccgccgtcgccgccgccgccgcaggaggcgaagaaggagtacccgcctgacctgacgctgcccgacctcaagagcggactgttcagcaccgacgagttccgcatgtacagcttcaaggtgaagccgtgctcccgcgcctactcccatgactggaccgagtgccccttcgtccaccccggcgagaacgcgcgccgccgcgaccctcgccgctactcctacagctgcgtgccttgcccggagttccgcaagggcggctcgtgccgcaagggcgacgcgtgcgagtacgcccatggcgtgttcgagtgctggctccacccggcgcagtacaggacgcgcctctgcaaggacgaggtcggctgcgcgcgccgcatctgcttcttcgcccacaagcccgacgagctccgcgccgtcaacccctccgccgtgtccgtcggcatgcagcccaccgtatcgtcgccgcgctcctcgcccgtttttttttctcgacatggcggcggcggcggcggcgatgatgagccccgcctggccgtcgtccccagcgagccgcctcaagacggcgctcggcgcgcgggagctcgacttcgacctcgagatgctcgcgctggaccagtaccagcagaagctgttcgacaaggtgtccggcgcgccgtcgccgagggcgagctggggcgccgcggcgaacggcctcgccaccgcgtcgccggcgagggccgtgccggactacaccgacctgctcggctccgtcgacccggccatgctgtcccagctccacgcgctgtccctcaagcaggccggcgacatgcccgcgtacagctccatggcggacaccacgcagatgcacatgccgacctcgccgatggtgggcggggcgaacaccgagttcgggctggaccactccatggcgaaggcgatcatgagctcccgcgcctcggcgttcgccaagcgcagccagagcttcatcgaccgcggaggccgcggccccggcggcgccgttcgctcatgtcgccggcgacgaccggcgcgccgtccattctctcggactggggctcgccggacggcaagctggactggggcgtccagggcgacgagctgcacaagctccgcaagtcggcgtcgttcgcgttccgcggccaatccgccatgccggtggcgacgcacgccgcggcggcggagccggacgtgtcatgggtgaactctcttgtcaaggacggccacgccgccggcgacatattcgcgcagtggccggagcaggagcagatggtggca

SEQ ID NO: 382 - protein, 602 aa, Oryza sativa
MCSGPRKPSTPPLPQQQKEATVMAASLLLELAAADDVAAVRRVVEEEKVSLGVAGLWYGPSASGVARLGMERRTAAMVAALYGSTGVLGYVVAAAPAEAARASETDGATPLHMAAAGGAANAVAATRLLLAAGASVDALSASGLRAGDLLPRATAAEKAIRLLLKSPAVSPSSSPKKSASPPSPPPPQEAKKEYPPDLTLPDLKSGLFSTDEFRMYSFKVKPCSRAYSHDWTECPFVHPGENARRRDPRRYSYSCVPCPEFRKGGSCRKGDACEYAHGVFECWLHPAQYRTRLCKDEVGCARRICFFAHKPDELRAVNPSAVSVGMQPTVSSPRSSPVFFSRHGGGGGGDDEPRLAVVPSEPPQDGARRAGARLRPRDARAGPVPAEAVRQGVRRAVAEGELGRRGERPRHRVAGEGRAGLHRPARLRRPGHAVPAPRAVPQAGRRHARVQLHGGHHADAHADLADGGRGEHRVRAGPLHGEGDHELPRLGVRQAQPELHRPRRPRPRRRRSLMSPATTGAPSILSDWGSPDGKLDWGVQGDELHKLRKSASFAFRGQSAMPVATHAAAAEPDVSWVNSLVKDGHAAGDIFAQWPEQEQMVA

SEQ ID NO: 383 - DNA, 729 bp, Oryza sativa
atggcgacggcgaggttgctcctagtgctcacggtggtggcggcggcgggcagctgcttctgcagcgcccaggaggcgaagccgccgccgtactgcggcagcgtgaggacggccattgaggcgcacaacatcatcggctggaagacgttcacggcggattgcgccaaatacctcgccgactacctcaccggcgatcgatacccccgcgacgccgacgtggtgatcaacgaggccatcgcctacgccgagagcctcaagctctccggcagcggcaaggagatctgggtgttcgacgtcgacgaaaccgcgctctccacactgccctaccaagccaaccatggctacggagttcagccatatgatcaggcaagcttcatccagtacgtgtccgagggaagcgcaccggcgctgcaggggacgctgcggctctaccaacggctgctccagctcggtgttaagccagtattcctgactgaccgcaccgaggaccaaaggacagtcaccaccaacaacctcctctctcagggttactgcagctgggagaaactgttgttccagccggttgggcttcagaccacaacacaggcgttcaagactgatgagcggcagaagcttgtggacgccggctatgtcatcgtcggcaacatcggcgaccagtggaccgacatcctcggctcgccggagggctgccgtacgtttaagtaccccaaccccatgtactatgtcgcc

SEQ ID NO: 384 - protein, 243 aa, Oryza sativa; identical to SEQ ID NO: 34

SEQ ID NO: 385 - DNA, 1134 bp, Oryza sativa
atgatgatgatgggggaaggagtcagcagcgtcccgccgtggtctcacctccccgtgagcggagtcgatgtactcggcggcggtggtggcggtggggatgagatgacgccgtacgtgatcgccgcgctgcgggattacctgccggcgaatgatgtcggggtgggggctgacgaggaggaggaggccgcggcgatggccgcggcggtggacgcgtacgcgtgcgacgagttccggatgtacgagttcaaggtgcggcggtgcgcgcgcgggcggagccatgactggaccgagtgccccttcgcgcacccgggggagaaggcgcgccgccgcgatccgcgcaagtaccactactccggcaccgcgtgcccggacttccgcaagggcgggtgcaagcgcggcgacgcctgcgagtacgcccacggcgtgtttgagtgttggctccacccggcgcgctaccgcacccagccgtgcaaggacggcaccgcctgccgccgccgcgtctgcttcttcgcccacaccccggaccagctccgcgtcctcccggcgcagcagtccagccccaggagcgtggcgtcctcgccgctggccgagtcctacgacggctcgccgctgcgccgccaggcgttcgagagctacctcaccaagaccatcatgtcctcgtccccgaccagcaccctcatgtctccgcccaagtcgcccccgtcggagtccccgccattgtcgcccgacggtgccgcggccatccgtcgcggatcttggcccggcgtcggctcgccggtgaacgacgtcctggcctcgttccgccagctccgcctcaacaaggtgaagtcgtcgccgtccggcgggtggagctacccttcgtcgtccgccgtctacggggtctcccaaggccgccaccggcctctacagcctccccaccactccactggcttccacggcaacggtgaccaccgcctccagcttcatgcccaacctggagccactggacctcgggctcatcggcgacgaggagccggtccagagggtggagtccggaagagccctccgggagaaggtgttcgagcgactgagccgggatggtgccatctccggcgacgccacagccttcgccaccgccggtgttggcctcgacgt

SEQ ID NO: 386 - protein, 378 aa, Oryza sativa; identical to SEQ ID NO: 66

SEQ ID NO: 387 - DNA, 1311 bp, Oryza sativa
atgaacaagcagaaacccatttggttgaggaagccagaggagatcaccaaggaagagtacgctgctttctacaagagcttgacaaacgactgggaggaacatctggctgtcaagcacttctctgtggagggtcagcttgaattcaaggccatcctgtttgtaccaaagagagcgccatttgacctctttgacaccaggaagaagcaaaacaacatcaagctgtacgtacgccgggtgtttatcatggacaactgtgaggagttgatcccagagtggctcagctttgtcaagggcattgttgattctgaagaccttcccctcaacatctcacgtgagatgctccagcagaacaagatcctgaaggtgatccgcaagaaccttgtgaagaagtgcgtggagctcttctttgagatcgctgagaacaaggaagactacaacaagttctacgaggctttctccaagaatctcaagcttggcatccatgaggattccaccaacaggaccaagattgctgagctcctgaggtatcactccaccaagagtggtgatgagttgaccagcctcaaggactacgtaacccggatgaaggagggccagagtgagatctattacatcactggtgagagcaagaaggctgttgagaactcccccttcctcgagaagctgaagaagaagggttatgaggtcctgtacatggttgatgccattgatgagtacgctgttggtcagcttaaggagtttgaaggcaagaagctcgtctctgccaccaaggaaggtctgaagcttgatgagagtgaggacgagaagaagcggcaggaggaactcaaggagaagttcgagggtctgtgcaaggtgatcaaggaggtgctcggtgacaaggtggagaaggttgttgtctctgaccgtgtggtggactctccctgctgtctagtcactggggagtatggctggactgctaacatggagaggatcatgaaggcccaggctctgagggactccagcatggccggctacatgtctagcaagaagaccatggagatcaacccggagaatgccatcatggacgagctccgcaagcgtgccgatgcggacaagaatgacaagtccgtgaaggacctggtgatgctgctcttcgagactgccctgctgacctccggtttcagcttggaggaccccaacaccttcggcaccaggatccaccgcatgctcaagctcggcctgagcatcgacgaggacgagtccgccgaggctgacgccgacatgccgccgctggaggacgacgccggcgagagcaagatggaggaggtcgac

SEQ ID NO: 388 - protein, 437 aa, Oryza sativa; identical to SEQ ID NO: 84

SEQ ID NO: 389 - DNA, 717 bp, Oryza sativa
atggcagctcccgccatcctccgcctcctccctcttctcctcctcgccgccgccgcgaacgccgccacgttcaccatcaccaacaagtgccagatcaccgtgtgggcggcagccgtgccgtccggcggcgggcagcagctggacccggggcagcagtgggtgatcgacgtgccggccggcacgacgggcgggcgcgtgtgggcgcgcacgggctgcagcttcgacggcagcggcaacgggcggtgccagacgggcgactgcggcggcgtgctgcggtgcgcggcgtacgggcagccgcccaacacgctggcggagttcgcgctgaaccagttcagcaacctcgacttcttcgacatctccctcatcgacggattcaacgtgcccatggacttcctcccccgccggcgacggcgccgggtgcgccaagggcgggccgcggtgcgaggcggacgtggcggggcagtgcccgagcgagctgagggcgcccggcgggtgcaacaacgcgtgcacggtgttcaagcaggaccagtactgctgcaccggctcggcggcgaacaactgcggcccgaccaactactcgcagttcttcaaggggctctgcccggacgcctacagctaccccaaggacgaccagacgagcaccttcacttgcccggccggcaccaactaccaggtcgtcttctgcccatgagggacgatgacttgttagctggcatc

SEQ ID NO: 390 - protein, 239 aa, Oryza sativa; identical to SEQ ID NO: 42

SEQ ID NO: 391 - DNA, 666 bp, Oryza sativa
atggctttttccatctccaagaaggctgcagttgctgcactcttctccttccttgttgtcacctgcgtcgccggcgccaggccggggaacttcagcgcctccgacttcaccgccgatcccaactgggaagtcgccagggccacctggtacggcgctcccaccggcgccggccctgacgacgatggcggtgcttgcgggttcaagaacaccaaccagtacccgttctcgtcgatgacctcctgcggcaacgagcctatcttcaaggacgggaagggctgtggctcatgctaccagataagatgcgtcaaccaccctgcctgctccggcaacccggagacggtgatcatcaccgacatgaactactaccccgtttccaagtaccacttcgacctgagcggcacggcgttcggcgccatggccaagccggggcagaacgaccagctccgccacgccggcatcatcgacatccagttcaagagggtgccgtgcaacttccctgggctgaaggtgacgttccacgtggaggaggggtcgaacccggtgtacttcgcggtgctggttgagtacgaggacggcgacggcgacgtggtgcaggtggatctcatggaggccaactccccagtcgtggacgccgatgcgcgagtcgtggggctccatctggaggct

SEQ ID NO: 392 - protein, 222 aa, Oryza sativa; identical to SEQ ID NO: 44

SEQ ID NO: 393 - DNA, 1248 bp, Oryza sativa
atgcagcaagaacaggcagacggccgggagatcgtcatcgccggcgccggcctcgccgggctcgcagtggccctcggactgcacaggaaaggactgaggagcgtggtgctggagtcgtcgccgacgctgcggacgtccgggttggcgttcatcacatggacgaacgccttccgcgcgcttgatgcccttggggtaggcgacaagatgaggagccagcaccagcagatccagaggttgaatgtcatgtcttcagctactggagaaatagtgcaagaaattgatctgagggcgcaaggcaaacggggaacccatgaggcacgctgcgtgagccgcaccgcgctgctactggcgttggaggaagagctcccaagaggcaccatccgctactcctccaagatcgtctcgatcgaggaagacggcaacgccaagatcctccatctgtctgacggatcgactctcagagcaaaggtgctgatcgggtgcgacgggatcaactcggtggtggcgagatggctggggctcgcgaagccgtcggactcggggcacacggccacgcgcggacgcgccaagtacccggacggccatggcttcgagcccaggtttctgcagttggtcggccagggattccgtgcaggcatggtgccctgcaacgacaccgacgtctactggttcttcacgtggtctccttccccagatgataaggatgtcgacaagagttcagccgcgacgaagcagttcgtgctgacaaagctccggagcacgaacgtgccaccacaggtgctcgaggcggtcgagcggagcgagatgaacgacgtgctcgcggcgccgctgcggttccgatcgccgctgtcgctcccgttcgcgagcatcagcaaggggaacgtgtgcgtcgccggcgacgcgctccacccgacgacgccggacctggcgcagggcgcgtgcacggcgctggaggacgccgtcgtcctggcgaggtgcctcggcgaggcgctgctgctccgtaccggcgactgcgccgccgaggagagtcaccgggtcgtcgaggccgcgctgcgccggtacgcggacgcccggcggtggaggagtgcgcagctgaccggtgcgtcgtacgcggtggggttcgtgcagcagagcgaccaccccgccgtgggcttcctgcgtgacaagctgttgtccggggtgctcgccaagacgctgctcatgatgcccgactacgattgcggcacgctctcgagttccggtgcttgt

SEQ ID NO: 394 - protein, 416 aa, Oryza sativa; identical to SEQ ID NO: 54

SEQ ID NO: 395 - DNA, 1017 bp, Oryza sativa
atggcgacttccatgggttgcctgttgatgctctgcttggtttctcccctcctcctcgccacctctgtccacggcaacccgtggtatgggtatgggtatggcttgttcccgcagttctacgaccactcgtgccccaaggcgaaggagatcgtgcagtccatcgtagcacaggcggtggccagggagaccaggatggcggcatccttggtcaggctgcattttcatgactgctttgtcaaggggtgtgacgcgtctgtgctcctggacaacagcaccaccatcatcagtgagaaggggtcaaaccctaacatgaactccctcaggggtttcgaggtcgtcgacgagatcaaggccgccctcgaagcagcttgccccggcaccgtctcctgcgccgacatactcgccctcgctgcacgcgattccactgtcctcgttggtggcccgtactgggatgtgccacttggccggagggactcactgggtgccagcatccagggctccaacaacgacatcccagctcccaacaacaccctccccaccatcatcaccaagttcaagcgccagggccttaacatcgtcgacgtcgtagccctctcaggtggccacaccattggcatgtctcggtgcaccagcttccgtcagaggctctacaatcagagcggcaatggcatggctgactacacactggatgtgtcctacgcggcacagctgaggcagggatgcccccgttctggtggtgacaacaacctcttcccgctagactttgtcagccccgcaaagttcgacaacttctacttcaagaacatcctgtctggcaagggccttctcagctctgatcaggtcctgcttaccaagagcgctgaaacagcggcgctcgtgaaggcgtatgctgatgatgtcaacctcttcttcaagcacttcgcacagtcaatggtgaatatgggcaacatctcgcctctgactggatcacagggggagatcaggaagaactgcaggaggctcaacaactactaccac

SEQ ID NO: 396 - protein, 339 aa, Oryza sativa; identical to SEQ ID NO: 60

SEQ ID NO: 397 - DNA, 279 bp, Oryza sativa
atggagagggttgcatcgagctgtctcagccttctggcacaaaggaggggttactcggtggcggcggccgtggcgaagggagccggccggagggcggacgagaagaaggtggcggcggcggtggccaagcgcacgatggcgaaggccgccgaggagaagacggcgtgggtgccggacccggtgaccgggtactaccggccggccggcggcgcaaaggaggtggacgcggcggagctgcgcgccaagctgctctccaactccaagaggatggctgccaac

SEQ ID NO: 398 - protein, 93 aa, Oryza sativa; identical to SEQ ID NO: 48

SEQ ID NO: 399 - DNA, 789 bp, Oryza sativa
atggcggctgaactagatggagcaggtgtagccggggggagggttcttgccgcaggtgaggaggagctggagcgcgaggggcaggtagatgttgatgttgaggagcttgagcctgatggtggtgcagaggcacacggcggcctccagctccacgagcccctccagcagcgggcagcacttgttcaccaccgggtcgccgatccccacgtgcaccagcccccccagcaggtccacgcacgccccgatcttcagcgagtccaccgggcacctctgcgtcgccggcggcggcggcgggcacggcgtcgtcgtcggcggcgtcgggtacgtcaccggcggcgtcgggtatgtcaccggcggcgtcgggtaggtgaccggagggccgacgacgaccggaggggtggtgaccggaggtgtggggtaggtgaccggcgggccgacgacgaccgggggggtggtgaccggaggtgtggggtaggtgaccggcggcggacgggtgacggggcccttcggcgggtgggtgacggggaccttgggaggggcgacgagcggcggcgggcgggtgaccggagacgggtaggtggggcccttgggggggcgaggggtagggttcttggggcccttggggtggccgggagagggagaagggtgcgagggcttggggtgcttgggcttgtcgcagtcgcattccgggtcgtactccgcgaggatggaagccacggtggtggagaggaggaggagcagcgtcaggaggaatggccgcagcttggtgctgcccgccatggctgctgc

SEQ ID NO: 400 - protein, 263 aa, Oryza sativa; identical to SEQ ID NO: 50

SEQ ID NO: 401 - DNA, 957 bp, Oryza sativa
atggctgatgaaatccagcatctgaccagggccttctcagggctcggtggcctcggcgtggacgagccggcgatggtgtcggcgctggccaagtggcgcaggcagccggagaagctgtccgggttcaggaagagcttcaatggcttcttcaaggatcatggcggcgtcatcgagaagtgcgaggaggagtacatgctccacctcgccgccgagttctcgcggttcaagaacctgatggtgatgtgggcgatgcacccgtgggagcgcgacgcgcggctggcgcaccacgtgctccaccaggcgcacccggcggccatcgtcgtggagatcgcttgcacccggacggcggaggagctcctcggcgctcgcaaggcgtaccaggcgctgttccaccactccctcgaggaggacgtcgcctaccgcgccagggacaagccctactgcggcctgctggtcgggctggtgagcgcgtaccggtacgagggcccgagggtgagcgaggagacggcgcgcgcggaggcgaaggcgctcgtcgccgcggtgaagagcgccggccacgcggcggcgaagctggtggagaacgacgacgtcgtcaggatcctcaccacccggagcaagccgcacctcgtcgagaccttcaagcactacaaggaaatccatggccgccacatcgaagaggatcttgggcacgaggagacactgagggaggcggcgctgtgcctggcgacgccggcgaggtacttcagcgaggtggtggcggcggcggtgagcgacggcgccgaccaccacgcgaaggaggcgctgacgcgggtggcggtgacgcgggcggacgtggacatggacgccatccgcgcggcctaccacgagcagttcggcgggaggctggaggacgccgtcgccgggaaggcgcacggctactacagagacgcgctcctctcgctcgtcgccggcggcaag

SEQ ID NO: 402 - protein, 319 aa, Oryza sativa; identical to SEQ ID NO: 56

SEQ ID NO: 403 - DNA, 990 bp, Oryza sativa
atgatgaggcgcagcttggtgattgtgatggtggcctgcagctgcgccacagccatagccagaggaggaggaggaggaggtctgaagctcaacttctactcggagtcggagaggtgcccgagggcggaggaggtggtgagggaggaggtgcggaggctgtacgaggagcacggcaacacggcggtgtcgtggttgagggcactcttccacgactgcatggtctactcctgcgacgcctccctgctgctccacaccaccaccaccacaggcgtctccgagcagtcctcccaccgcagcttcggcatgcgcaacttcaagtacatcaccgccatcaaggccgccgtcgagcgtgagtgccctgccaccgtctcctgcgccgacatcctcgccctggccgcccgcgacggcgtggccatgctgggtgggccctcggtggccatgcggacggagcggcgcgacagcagggagagctactacggcgtggtggagcagtacatccccaaccacaacgacagcgtgtccaccgtgctgtcgaggttcgctgccatcggggtggacacggagggagcggtggcgctgtgtggcgcgcactcggtggggcgcgtccattgcttcaacctggtggggaggctgtacccgcaggtgaacggcagcatggacgccggcgtacggggagtacctgcgggggaggtgcccgacggctgcggcgacggaggacacgagagaggtggtgtacgcgcgcaacgaccgcgtcacgcccatgctcatcgacaacatgtactaccgcaacctgctcgccgggcgggggctcctcctggtggaccagcagctggcctccgacgcccgcacggcgccctacgtccgccggatggccgccgacaacgactacttccaccagcgcttcgccgcagcgcttctcaccatgtccgagaacgcgccgctcaccggcgcacagggggaggtcagaaaagactgcaggttcgtcaactc

SEQ ID NO: 404 - protein, 330 aa, Oryza sativa; identical to SEQ ID NO: 62

SEQ ID NO: 405 - DNA, 543 bp, Oryza sativa
atgttctacgcgcccgtgctgttcaacacgctcgggttcaagaccgacgcgtcgctctactccgcggtgatcacgggggccgtgaacgtgctgtccacgctggtgtccgtctactcggtggacagggtggggaggcggatgctgctgctggaggccggcgtgcagatgttcctgtcgcaggtggccatcgccgtcgtgctggggatcaaggtgacggaccggtcggacaacctcggccacgggtgggcgatcatggtggtggtgatggtgtgcacgttcgtgtcctccttcgcgtggtcgtggggcccgctcgggttggctcatcccccagcgagacgttcccgctggagacgcggtcggcggggcagagcgtcaccgtgtgcgtcaacctgctcttcaccttcgtcatcgcgcaggcgttcctctccatgctctgccacctcaagtacgccatcttcgccttcttctccgcgtgggtcgtcgtcatgtcgctcttcgtgctcttcttcctgcccgagaccaagaacatccccatcgaggaga

SEQ ID NO: 406 - protein, 181 aa, Oryza sativa; identical to SEQ ID NO: 52

SEQ ID NO: 407 - DNA, 693 bp, Oryza sativa
atgctccgcaagcacacctacttcgacgagctcgcgcagagcaagcgcaccttcgccgcctccacgccgtcggccgcgaccaccaccgcctccctctccaacggccacctctcgtcgccccgctcccccttcgcgcccgccgcggcgcgcgaccacctgttcgacaagacggtcaccccgagcgacgtgggcaagctgaacaggctcgtcataccgaagcagcacgccgagaagcacttcccgctacagctcccgtccgccggcggcgagagcaagggtgtcctcctcaacttcgaggacgccgccggcaaggtgtggcggttccggtactcgtactggaacagcagccagagctacgtgctaaccaagggctggagccgcttcgtcaaggagaagggtctccacgccggcgacgtcgtcggcttctaccgctccgccgccagtgccggcgacgacggcaagctcttcatcgactgcaagttagtacggtcgaccggcgccgccctcgcgtcgcccgctgatcagccagcgccgtcgccggtgaaggccgtcaggctcttcggcgtggacctgctcacggcgccggcgccggtcgaacagatggccgggtgcaagagagccagggacttggcggcgacgacgcctccacaagcggcggcgttcaagaagcaatgcatagagctggcactagta

SEQ ID NO: 408 - protein, 231 aa, Oryza sativa; identical to SEQ ID NO: 58

SEQ ID NO: 409 - DNA, 906 bp, Oryza sativa
atgtacgtacacaccaaacgttttattcgttattactttgtttattattcagtcctgatcgatgagccgcgcagcatgtgtgcatgtaactcaacagtaaaggttgccacccgggtcaacgccgaattggcggcagtagtctttgtagtagtttacccttgcgttgacggcgccggggttcttgccgttgcactcgagcgcaccgttgatggcccggatggtggcgccgaacccctgcaacatcacctggtgcacgttgttcatccagaaccagagcgccgtcttgaaggagatcgtcgggtcctgcgccaccctgtccgggtccctcagcccgtcgaacccgatgttctgccccgcaggcccgtagttgtagttccacgagatctgcagcggcccgcgcccgtagtacttcttccccggctggcacggccactgcttgttgttcttgtcgcagtagtccatgctcgccccgtttatctcgttgatgtagcacatatgtccggtctcatgagtgacgtgggcaaagaaggcagcgatctcacgcttggagtcatcgttggtgcggtccctggcgaagcccgagtaggagtgggcagcgttaagaaacgactgtcgtgtgtaaaagttcttgccggcgcaaccgttcggggcctggttcttgatcccattgaagaacgcctcggtgaccacgctctctacagacacgccgctgcctccgcctccgcctccaccacctccgcctcctcctcctccaccgccgccgccgccgtagcacgggccagagcggcacccatctccgcagtagtccttgcccgtgccgcagtacccccatttgctgcagcacatgttcgactggcagccgcagttctgcgcgctcgcctggccggtggcggagaggaggagcgc

SEQ ID NO: 410 - protein, 302 aa, Oryza sativa; identical to SEQ ID NO: 72

SEQ ID NO: 411 - DNA, 870 bp, Oryza sativa
atggcgaagcatctcgcgctgtccgtggccgccgcggtggccgtgtcgtggctggcggcgtcgtcggcggcggcggcggggttctacgagaagttcgacgtggtgggcgccggcgaccacgtgagggtggtgagcgacgacgggaagacgcagcaggtggcgctgacgctggaccggagctccgggtccgggttcacctccaaggacacctacctgtttggcgagttcagcgtccagatgaagctcgtcggcggcaactccgccggcaccgtcacctccttctacctctcctccggcgagggcgacggccacgacgagatcgacatcgagttcatgggcaacctcagcggcaacccctacgtcatgaacaccaacgtctgggctaatggcgacggcaagaaggagcaccagttctacctctggttcgaccccaccgccgacttccacacctacaagatcatctggaatccccaaaacatcatattccaggtggacgacgtgccggtgaggacgttcaagaagtacgacgacctggcgtacccgcagagcaagccgatgaggctgcacgcgacgctgtgggacggcagctactgggcgacgaggcacggcgacgtcaagatcgactggagcggcgcgccgttcgtggtgtcgtaccgcgggtacagcaccaacgcgtgcgtcaacaacaatcccgccggcgggtggtcgtcgtcgtggtgccccgagggcacgtcggcgtggatccaccgcgagctcgacggcgccgagctcggcaccgtcgcgtgggccgagcgcaactacatgtcctacaactactgcgccgacggctggcgcttcccccagggcttccccgccgagtgctaccgcaag

SEQ ID NO: 412 - protein, 290 aa, Oryza sativa; identical to SEQ ID NO: 70

SEQ ID NO: 413 - DNA, 969 bp, Oryza sativa
atgagagcgctcgccgtggtcgtggtggccacggcctttgcggtggtggccgtgcgcggcgagcagtgcggcagccaggccggcggcgcgctctgccccaactgcctctgctgcagccagtacggctggtgcggatccacctccgcctactgcggctccggctgccagagccagtgctccggcagctgcggcggcggcggcccgaccccgccctccggcggtggcggcagcggcgtcgcctccatcgtgtcgcgctcgctcttcgaccagatgcttctccaccgcaacgacgcggcgtgcccggccaagaacttctacacctacgacgccttcgtcgccgccgccaacgccttcccgagcttcgccacaaccggcgacgccgccacccgcaagcgcgaggtcgccgcgttcctggcgcagacgtcgcacgagaccacgggcgggtgggcgacggcgcccgatggcccctactcgtggggctactgcttcaaggaggagaacaacggcaacgttgggtccgactactgtgtccagagctcgcagtggccgtgcgccgccggcaagaagtactacggccggggacccatccagatctcctacaactacaactacggcccggcggggcaggccatcggctccaacctgctgagcaacccggacctggtggcgtcggacgccaccgtctccttcaagacggcgttctggttctggatgacgccgcagtcgcccaagccgtcgtgccacgcggtgatgacagggcagtggacgcccaacggcaacgaccaggcggcggggcgcgtgccgggctacggcgtggtgaccaacatcatcaacggcggcgtggagtgcggccacggcgcggacagcagagtcgccgaccggattgggttctacaagcgctactgcgacatgttgggcgtcagctacggcgccaacttggactgctacaaccagaggcctttcaactcc

SEQ ID NO: 414 - protein, 323 aa, Oryza sativa; identical to SEQ ID NO: 68

SEQ ID NO: 415 - DNA, 738 bp, Oryza sativa
atggggcggggcaaggtgcagctgaagcggatcgagaacaagatcaaccggcaggtgaccttctccaagcgcaggtcggggctgctcaagaaggcgaatgagatctccgtgctctgcgacgccgaggtcgcgctcatcatcttctccaccaagggcaagctctacgagtacgccaccgactcatgtatggacaaaatccttgaacgttatgagcgctactcctatgcagaaaaggtccttatttcagctgaatctgacactcagggcaactggtgccacgaatataggaaactgaaggctaaggttgagacaatacagaaatgtcaaaagcacctcatgggagaggatcttgaatctttgaatctcaaagagctgcagcagctggagcagcagctggaaaattcgttgaaacatatcagatccagaaagagccaactaatgctcgagtccattaacgagcttcaacggaaggaaaagtcactgcaggaggagaataaggtcctacagaaagaactggtggagaagcagaaagtccagaagcaacaagtgcaatgggaccagacacaacctcaaacaagttcctcatcatcctccttcatgatgagggaagcccttccaacaactaatatcagtaactaccctgcagcagctggcgaaaggatagaggatgtagcagcagggcagccacagcatgttcgcattgggctgccaccatggatgctgagccacatcaacggc

SEQ ID NO: 416 - protein, 246 aa, Oryza sativa; identical to SEQ ID NO: 46

SEQ ID NO: 417 - DNA, 498 bp, Oryza sativa
atggattctgcaagcactacctgtggcctctcctccattaccttctgccgctcacgccgtcgtcgctgggcgggttgccgttcgaccgcgcgctctaccattctttcctctcggcgaaccgggccttcgccgaccgcctcaccgaggtgttcagccccgacgacgacctcgtctggatccacgattaccacctccttgccctccccaccttcctccgcaagcgattcccgcgcgccaaggtcggtttcttcctccactcgccgttcccctcctcggagatcttccgcaccattcccgtcagggaggacctcctccgcgccctcctcaacgccgacctcgtcggcttccacaccttcgactacgcgcgccacttcctctccgcctgctcgcggctgctcggcctggattaccagtccaagcgcggctacatcggcatcgagtactatggtcgcaccgtcacggtcaagattctgcccgtcgggatcgacatgggccagc

SEQ ID NO: 418 - protein, 166 aa, Oryza sativa; identical to SEQ ID NO: 82

SEQ ID NO: 419 - DNA, 915 bp, Oryza sativa
atgtggtggtccaagttccattcgaacaagctcaagtacacgcgtgggtacctgatcgaggtgatgcactcggacacggtggtgatatcgaacgtgacgctggtgaactcgccggcgtggaacatccacccggtgtacagcagcaacatcgtggtgcagggggtgacgatcctggcaccgacgcactcgcccaacaccgacggcatcaacccggactcgtgctcccacgtccgcatcgaggactgctacatcgtgtccggcgacgactgcgtggcgatcaagtccgggtgggacgagtacgggatcgcgtacgggatgcccagccagcacatcgtggtgcggaggctgacgtgcgtgtcgccgacgagcgcggtgatcgcgctgggcagcgagatgtcgggcgggatcagcgacgtgcgggcggaggacataacggcggtgaactcggagtcggcggtgcggatcaagacggcggtggggcgtggggcgtacgtgcgcgacgtgttcgtccgggggatgtcgctggacaccatgaagtgggtgttctggatgacggggaactacaagtcccacccggacgacgggtacgaccccaacgccatccccgtcgtggacaacatcagctaccaggacgtggtggccacgggggtgtacaaggaggccgccaggctggagggcatccagggcgcccccttccgcggcatctgcatcgccaacgtcaccgccacgctctccaagtcgcgcaagtacccgtggacctgcaccgacatcgagggggtgtccaccggcgtcacgccggcgccgtgccagccgctgcagggggcgcacgatggcgcctgcccgttccccacggacacgctgcccatcgaccagctcgtcatgcagcagtgcgcctactccgtcccggcctccatc

SEQ ID NO: 420 - protein, 305 aa, Oryza sativa; identical to SEQ ID NO: 80

SEQ ID NO: 421 - DNA, 1803 bp, Oryza sativa
atgtgctctgggccgcgcaagccgtccacgccgccgctgccgcagcagcagaaggaggcgacggtgatggcggcgtccttgcttcttgagctggcggcggcggacgacgtggcggcggtgaggagggtcgtggaggaggagaaggtgtctcttggcgtggctgggttgtggtatgggccttcggcgagcggcgtggcgaggctcgggatggagcggaggacggcggcgatggtggcggcgctgtacgggagcacgggggtgcttgggtatgtcgtggcggcggcgccggcggaggccgcgcgcgcgtcggagacggatggggccacgccgctgcacatggcggctgccggtggcgcggcgaacgcggtcgcggccacgcgcctgttgctcgccgcgggggcgtcggtcgacgcgctctcggcttcggggctccgcgccggtgacctcctcccgcgcgccaccgccgcggagaaggccatccggctgctgctcaagtcgccggccgtgtcgccgtcgtcgtcgccgaagaagtcggcctcgccgccgtcgccgccgccgccgcaggacgcgaagaaggagtacccgcctgacctgacgctgcccgacctcaagagcggactgttcagcaccgacgagttccgcatgtacagcttcaaggtgaagccgtgctcccgtgcctactcccatgactggaccgagtgccccttcgtccaccccggcgagaacgcgcgccgccgcgaccctcgccgctactcctacagctgcgtgccttgcccggagttccgcaagggcggctcgtgccgcaagggcgacgcgtgcgagtacgcccatggcgtgttcgagtgctggctccacccggcgcagtacaggacgcgcctctgcaaggacgaggtcggctgcgcgcgccgcatctgcttcttcgcccacaagcccgacgagctccgcgccgtcaacccctccgccgtgtccgtcggcatgcagcccaccgtatcgtcgccgcgctcctcgccgcccaacgggctcgacatggcggcggcggcggcggcgatgatgagccccgcctggccgtcgtccccagcgagccgcctcaagacggcgctcggcgcgcgggagctcgacttcgacctcgagatgctcgcgctggaccagtaccagcagaagctgttcgacaaggtgtccggcgcgccgtcgccgagggcgagctggggcgccgcggcgaacggcctcgccaccgcgtcgccggcgagggccgtgccggactacaccgacctgctcggctccgtcgaccaggccatgctgtcccagctccacgcgctgtccctcaagcaggccggcgacatgcccgcgtacagctccatggcggacaccacgcagatgcacatgccgacctcgccgatggtgggcggcgcgaacaccgcgttcgggctggaccactccatggcgaaggcgatcatgagctcccgcgcctcggcgttcgccaagcgcagccagagcttcatcgaccgcggaggccgcgccccggcggcgcgttcgctcatgtcgccggcgacgaccggcgcgccgtccattctctcggactggggctcgccggacggcaagctggactggggcgtccagggcgacgagctgcacaagctccgcaagtcggcgtcgttcgcgttccgcggccaatccgccatgccggtggcgacgcacgccgcggcggcggagccggacgtgtcatgggtgaactctcttgtcaaggacggccacgccgccggcgacatattcgcgcagtggccggagcaggagcagatggtggca

SEQ ID NO: 422 - protein, 601 aa, Oryza sativa
MCSGPRKPSTPPLPQQQKEATVMAASLLLELAAADDVAAVRRVVEEEKVSLGVAGLWYGPSASGVARLGMERRTAAMVAALYGSTGVLGYVVAAAPAEAARASETDGATPLHMAAAGGAANAVAATRLLLAAGASVDALSASGLRAGDLLPRATAAEKAIRLLLKSPAVSPSSSPKKSASPPSPPPPQDAKKEYPPDLTLPDLKSGLFSTDEFRMYSFKVKPCSRAYSHDWTECPFVHPGENARRRDPRRYSYSCVPCPEFRKGGSCRKGDACEYAHGVFECWLHPAQYRTRLCKDEVGCARRICFFAHKPDELRAVNPSAVSVGMQPTVSSPRSSPPNGLDMAAAAAAMMSPAWPSSPASRLKTALGARELDFDLEMLALDQYQQKLFDKVSGAPSPRASWGAAANGLATASPARAVPDYTDLLGSVDQAMLSQLHALSLKQAGDMPAYSSMADTTQMHMPTSPMVGGANTAFGLDHSMAKAIMSSRASAFAKRSQSFIDRGGRAPAARSLMSPATTGAPSILSDWGSPDGKLDWGVQGDELHKLRKSASFAFRGQSAMPVATHAAAAEPDVSWVNSLVKDGHAAGDIFAQWPEQEQMVA

SEQ ID NO: 423 - DNA, 975 bp, Oryza sativa
atgcgcaacggccgccgcgacgactcctaccagaagtggcgctggcagccgaccgactgcgacctgccccggttcgacgcgaggctgctgctggagcggctgcgcaacaagcggctgatgttcgtgggggattcgctgaaccgcaaccagtgggagtcgatggtgtgcctggtccagtccgtgatccccaagggcaagaagacgctcaccaagttcgtcaacggcggcaacagcaacatcttctacgcacacgagtacaacgcgacggtggagttctactgggcgccgttcctggtggagtcgaactcggacaacccgcaggtgcacagcgtccccgaccgcgtcatccagtggcactccatcgccaagcacgcgcacaactggctcggcgtcgactacctcatcttcaacacctacatctggtggctcaacaccctcgacatgaaagtcctgaaggggtcgttcgaccagggtgcgacggagtacgtggaggtggaccggcccgtggcgtacaaggaggtgctcaagacgtgggcgaagtgggtcgaccgcaacattgaccccaaccggacgaccgtcttcttcatgagcatgtctcccaaccacatcacgccggaggcgtggggaaactacggagggatcaagtgcgcgatggagacgctgccgatcacgaaccggacgacgtcgctggacgtgggcacggactggaggctgtacgccggggcgcaggaggtgctccagacgttccgccgggtgccggtgcacctcgtcgacatcacggcgctgtcggagctccgcaaggatgcgcacacgtcggtgcacacgctccggcaggggaagctgctcacccccgagcagcagtccgaccccaagacgtacgccgactgcatccactggtgcctcccgggcctccccgacacctggaaccagttcctctacgcccgcatcgcctccgccccatggtcatccgaccag

SEQ ID NO: 424 - protein, 325 aa, Oryza sativa; identical to SEQ ID NO: 78

SEQ ID NO: 425 - DNA, 1011 bp, Oryza sativa
atggatctcttcaggaagtgtatggagcctgtggagaagtgcctcagggatgctaagatggacaagagctctgttcatgatgttgtccttgttggtggctccactaggatcccgagggtgcagcagctcctgcaggatttcttcaacggcaaggagctttgcaagaacatcaacccagatgaggctgttgcttatggtgctgctgtccaggctgccatcttgagtggtgagggcaacgagaaggtccaggacctcctcctgttggatgttacccctctctctctcggattggagactgctggtggtgtcatgaccgttttgatcccaaggaacaccaccattcccaccaagaaggagcaggtcttctccacctactccgacaaccagcctggtgtgctcatccaggtttatgagggtgagaggaccaggacacgtgacaacaacctgctggggaagtttgagctctctggaatccctcctgctcccaggggtgttccacagatcactgtttgcttcgacattgatgccaatggtatcctgaacgtgtctgctgaggacaagaccaccgggcagaagaacaagatcaccattaccaacgacaagggcaggcttagcaaggaggagattgagaagatggtccaggaggccgagaagtacaagtcagaggatgaggagcacaagaagaaggtggagtccaagaacgcgctggagaactacgcctacaacatgcgcaacaccatcaaggatgagaagatcgcctcgaagctcccggcagcggacaagaagaagatcgaggatgccatcgaccaggccatccagtggctggacggcaaccagctcgctgaggctgatgagttcgatgacaagatgaaggagctggagggcatctgcaaccccatcatcgccaagatgtaccagggcgctggcgcggacatggccggcggcatggacgaggacgatgctcccccggctggcggcagcggtgctggccccaagatcgaggaggtcgac

SEQ ID NO: 426 - protein, 337 aa, Oryza sativa; identical to SEQ ID NO: 98

SEQ ID NO: 427 - DNA, 657 bp, Oryza sativa
atgacgccggtgaaggtgtttgggccggcgcaatcgacgaacgtggcgagggtgctgttgtgcctggaggaggtcggcgccgagtacgaggtcgtcaacgtcgacttcacggtcatggagcacaagagccccgaacacctcaaacgcaacccgttcgggcaaatcccagctttccaggacggggatctgtacctctttgagtcccgcgctattggaaagtacatcctacgcaagtacaagacgagggaagctgacctactccgggaaggcaacttgagggaggcagccatggtggatgtctggaccgaggtggagacacaccagtacaactcggcgatttcaccgattgtgtacgagtgcatcatcaacccagccatgcgtgggatcccaactaaccaaaaggtcgtggacgagagcgcggagaagctgaagaaggtgctggaggtgtacgaggcacgactgtcacagagcacgtacctcgcaggtgacttcgtcagcttcgccgacctgaaccacttcccctacaccttctacttcatggggacaccgtacgcgtcgctgttcgactcgtaccctcatgtgaaggcatggtgggagaggctcatggcgaggccgtccgtcaagaagctcgccgcggtcatggctcctcagggggcg

SEQ ID NO: 428 - protein, 219 aa, Oryza sativa; identical to SEQ ID NO: 112

SEQ ID NO: 429 - DNA, 798 bp, Oryza sativa
atggcggagcccaacccgcaagtggagagggaggtggaggtggaggaggtgaggaggccgaagctgaggtacttggagttcgtgcaggtggcggcagcgcaggcgacgatctgcctcgcggggctctacgcgcttgccaaggaccacgccggcccgctccgccccggcgtcgacgccgtcgagtccgccgtcaagggcgtcgtcggccccgtctacggccgcttccatggcgtccccctcgacgtcctcgccttcgtcgaccgcaaggtggatgacacggtgcaagagctggaccgacacctcccgccgacgctgaaggccgcctccgccaaggcttgcgcggtggcccgcggcgtgccggacgtggcgagggagctcccccgcggaggtgcagcagtcgggcgtcaccggcgccgcgcgcgtcgcgtacgccaaggtcgagcccgtggccaagggcgtgtacggcaggatccagccggcggccaaggacctctacgtgcgctacgagccggcggcggagcacctcgccgtctccacctggcgctcgctcaacaacctgccgctgttcccgcaggtggcgcagatcgccgtgcccaccgccgcctactgggccgagaagtacaacaaggtgatcgccgccgcggccgacaagggttacaccggagcacagtacctccccgccatccccaccgagcgcatcgccaaggttttcggcgagttatcgccggaggcccagccgtcgaagagcgagtcggcgaagacccagtaggtgaggtcaccgcgcctgaaggtgagagg

SEQ ID NO: 430 - protein, 266 aa, Oryza sativa
MAEPNPQVEREVEVEEVRRPKLRYLEFVQVAAAQATICLAGLYALAKDHAGPLRPGVDAVESAVKGVVGPVYGRFHGVPLDVLAFVDRKVDDTVQELDRHLPPTLKAASAKACAVARGVPDVARELPRGGAAVGRHRRRARRVRQGRARGQGRVRQDPAGGQGPLRALRAGGGAPRRLHLALAQQPAAVPAGGADRRAHRRLLGREVQQGDRRRGRQGLHRSTVPPRHPHRAHRQGFRRVIAGGPAVEERVGEDPVGEVTAPEGER

SEQ ID NO: 431 - DNA, 681 bp, Oryza sativa
atgtcccgcctgccggctcgcgtcgccggcgccgtagctcgcggcatcgtcaccttcgtcttcgccacagtgggcacgatcctgggggcgatcaccggcgggctgatcgggctggcgacggagagcggcatggtgcggggcaccgggatcggggccatctccggcgcggtggtcgccatggaggtcgtcgactcctccgtcgccatgtggtgctcccacgactccgggatctggagcgttctctacgtccttgacgtgatctggagcctcctgacggggcggctggtgcgggagaaggtggatccggcggtgcagaacgcggtggacagccagatgaacgccgccgacgcgcccttcagggagagcgcgccgacgctggcggagatgttcgacaccggcatccccggcgtcgccgccgccgccacgggcatgccggcggacgccatcgccgcgctcccggtcaccacgttcgccgccgccgccggcggcgacgaccgcgccggctgctccgtgtgcctccaggacttggaggacggcgagcgggcgcggaggctgccggagtgcggccacacgttccacctccgctgcatcgacagctggctgctcaggcacgcgtcgtgccccctgtgccggcgcacggtggtcgccgccgccgtcgccgtcgacgacgtcgtcgtcggc

SEQ ID NO: 432 - protein, 227 aa, Oryza sativa; identical to SEQ ID NO: 100

SEQ ID NO: 433 - DNA, 975 bp, Oryza sativa
atggagaccatcgcccacaccaaggcgacccgccccgagacggacccggacaccgacatgtccgtggaagcccaggagtttaagcaggtcgtcgacgagatcatcccgcacatcggcgcggccaacctgtgggactacttgccggcgctccggtggttcgacgtgttcggcgtcaggaggaagatcctcgccgctgtaagccggagggacgcgttccttcgccgcctgatcgacgcggagcggcggaggctggacgacggcgacgagggcgagaagaagagcatgatcgccgtgctgctcactctgcagaagacagagccggaggtgtacaccgataacatgatcacagctctaacggcgaacttgttcggagcaggaacagagacaacctcgacgacatcagaatgggcgatgtcgctactgctgaaccaccccgacacactcaagaaagcgcaagccgagatcgacgcatccgtcggcaactctcgcctgatcaccgccgacgacgtgactcgcctcggctacctccagtgcatcgtcagggagacgctccgcctgtaccccgccgcgccgatgctcctcccgcacgagtcctccgccgactgcaaggtcggcggctacaacatcccgcgcgggtcgatgttgctcatcaacgcgtacgccatccaccgtgacccggcggtgtgggaggagccggagaagttcatgccggagaggttcgaggacggcgggtgcgacggcaatctcttgatgccgttcgggatggggaggcggaggtgccccggcgagacgctggcgctgcgcacagtggggttggtgctgggcacgctgatccagtgcttcgactgggagagggtcgacggcgtggaggtcgacatgactgaaggtggcgggctcaccatccccaaggtcgtgccgttggaggccatgtgcaggccgcgcgacgccatgggtggtgttcttcgcgagctcgtc

SEQ ID NO: 434 - protein, 325 aa, Oryza sativa; identical to SEQ ID NO: 102

SEQ ID NO: 435 - DNA, 507 bp, Oryza sativa
atggctctcgtggagggaaacaacggcgtgtcggggggagcggtcagcttcagcgaggagcaggaggcgcttgtgctcaagtcgtgggccatcatgaagaaggattccgccaacattggactccgcttcttcttgaagatcttcgaggtcgcgccgtcggcgagccagatgttctcgttcctgcgcaactccgacgtgccgctcgagaagaaccccaagctcaagacccacgccatgtccgtcttcgtcatgacatgtgaggccgccgcgcagctgcggaaagccgggaaggtcaccgtgagagacaccaccctgaagaggctcggcgccacgcacttcaagtacggcgtcggagacgcccactttgaggtgacgaggttcgcgctgcttgagacgatcaaggaggcggttccggtggacatgtggagccccgcgatgaagagcgcgtggagcgaagcctacaaccaactggtcgcggccatcaagcaggagatgaagcctgctgag

SEQ ID NO: 436 - protein, 169 aa, Oryza sativa; identical to SEQ ID NO: 88

SEQ ID NO: 437 - DNA, 939 bp, Oryza sativa
atgcttcggacggagaagcacatcggatatagagaggaggaagaagaggaggaagagatgagcggcggcggcaaacggcgaggaggccggcggcgagggcaggcgcacggcgacgagacgacggcgtacggagcgccatcatcaggcggcagcgtcgtcccaggtggcggcccagttggtggcgctgccgacgcggggcatggagttgatcttggtgaaggtgtcgaccttgaaggtggcgccgcacatgacgccctcgctgtccacccgcggcatcgccttcagccggttcatcgggtgctcgaagctcttgagccccccctcgctgtggaacatgcaccccaccgggaacggcgcgtacgacttgccgcaccctcccttcacgatctccctctcgtcgcagatcaccaccgacccatccgccgcgatcccccaatacaacggcacctccccatccgtactcagggcggcgaagacggcgccggacttgttgtcgaagacgacgaaggcgaaggagccggagagatccttgacgacctggtcggcggggtaggggccgcggtcgcggagggtgcggtaggcctcgatgacgagcagcgcctcgttggtggagcggctgcacagcccgtactgccggatcaggctgctcaggttgtccagcctccccatgaacacgcagtagatgtcatccagcccacagaacatcctctcgtagccagagaggccattgcgggcgtggccggcgacgcaggcgagggcggcgccgccgccgaaggaggtggagaaggcctcgatggggtggagggcgtggaagtccctgaggatctcgtcggggttcttgggcttcgccgcgctgctccgcgggctgttcagctccgccggcgcgtgcgccacctgcttctggaatatggccaacattttcttcttcctcttgctagc

SEQ ID NO: 438 - protein, 313 aa, Oryza sativa; identical to SEQ ID NO: 104

SEQ ID NO: 439 - DNA, 1110 bp, Oryza sativa
atgcgtatatgtgtacggaatgcatcaaaagctgatggggtagacgtgctgcatgttggggtaaaagaggccccaattctgctcgacgccggcgtccttctggttctcgttgaacatggagaagacgtaggtctcgatggcgccggggtggcgcggcgtgccgcggccgacgtggttgatgaggttctggttgtagatccgggcgttggccggcgaggcggacatgccgccggcggagggccagcctgtctcggagacgacgagggagacgccggagccgccgtgcttggccatggcggcgtagaacgcgtcgacggtggtgtcgaacaggttctggtacccgtaggcgccgtcctggacgacggtgccggcggcggtgaagagcgcgtaggagacgtcgacgctgccctggctgtaggtgtaggagaagtaggggtagatgttggcgagcagcggcgcgccggtgcgggcgaggaagctcaggacgggcgccatgaacgcctgcgactcgccggtgaactccgcggcggacggcgggctgtacacggcgaggagcgcctgcgacaccgacgtcgtcaccttgatgtggcccagccccgccgacaccagcgcgccgcggacgttctccatggccgggaccaggctggacgtggcgccgccggcgacctcgttcccgacggcgacgtaccggaacgacaccgacgggtaggcctggatgttgttccgcacccacgacgccgccgcggcggggctggcggcgaggttggagagcacgtcgttgggcgcgccgacgacgacgctgatccccgtgccgcccaccgactgcagcgccgcctggtccggcgcgtacagccgcatcgacgtgatgccgttggagcggtacatccccaccaccgagctcgccggcggcaggttgttcgcgctcatgccgtagcacaccccgatcgcctccgccttttgaggaatggaggcaaaggcaccgaggagcaatgcgagagcgaacatggaggctacaccttggctagccatttctctcaaaacctctctcaaattccaaaagctaaaaatgagctatatataggagatgtggtttgtgtgtgctgctgccaa

SEQ ID NO: 440 - protein, 370 aa, Oryza sativa
MRICVRNASKADGVDVLHVGVKEAPILLDAGVLLVLVEHGEDVGLDGAGVARRAAADVVDEVLVVDPGVGRRGGHAAGGGPACLGDDEGDAGAAVLGHGGVERVDGGVEQVLVPVGAVLDDGAGGGEERVGDVDAALAVGVGEVGVDVGEQRRAGAGEEAQDGRHERLRLAGELRGGRRAVHGEERLRHRRRHLDVAQPRRHQRAADVLHGRDQAGRGAAGDLVPDGDVPERHRRVGLDVVPHPRRRRGGAGGEVGEHVVGRADDDADPRAAHRLQRRLVRRVQPHRRDAVGAVHPHHRARRRQVVRAHAVAHPDRLRLLRNGGKGTEEQCESEHGGYTLASHFSQNLSQIPKAKNELYIGDVVCVCCCQ

SEQ ID NO: 441 - DNA, 1308 bp, Oryza sativa
atgtcgatcgtgtcgtacggggagaggagcgaggaggaggcgcggcggctgtacgcggagtggaaggccgagcacggcaagagctacaacgccgtcggcgaggaggagcggcggtacgcggcgttcagggacaacctccggtacatcgacgagcacaacgccgccgccgacgccggggtccactccttccgcctcggcctcaaccgcttcgccgacctcaccaacgaggagtaccgggacacctacctcggcctcaggaacaagccgcggagggagaggaaggtcagcgacaggtacctcgccgccgacaacgaggcgctgccggagtccgttgactggaggaccaagggggccgtggctgagatcaaggaccagggaggttgcggaagttgctgggctttctcagcaatagcagctgtagaaggcatcaaccagattgttactggcgacctgatatctttgtctgagcaggagctagttgactgtgacacttcatataacgagggatgcaatggaggtctgatggactatgcatttgatttcatcatcaacaatggtggaatcgacaccgaggatgactacccttacaaaggcaaggacgaacggtgtgacgtaaacaggaaaaacgcaaaggttgtcacaattgacagctacgaagatgtaacaccaaacagtgagacgagtctgcagaaggcggtagcaaaccagcccgtcagtgttgcaattgaagccggtggcagagcattccagctctactcatcgggtatcttcacgggtaaatgtggaacagcactagaccacggcgtcgctgctgttgggtacggcacagagaatggcaaggactactggatcgtgaggaactcgtggggcaagagctggggtgagtccggctacgtccgtatggagcgcaacatcaaggcgagcagtggcaagtgcggcattgccgttgagccatcctaccctctgaagaagggcgagaaccccccgaaccccggccctactccgccgtccccaaccccgcctcccaccgtctgcgacaactactacacttgccccgatagcaccacctgctgctgcatctacgagtatggcaaatactgctacgcctggggctgctgcccactcgagggcgccacctgctgcgatgatcactacagctgctgccctcacgagtaccccatctgcaatgttcagcagggaacctgcctcatggctaaggacagtccactggcagtgaaggctctgaagcgtaccctggcaaagccaaacttgtctttcttgtttggcaacggcaagaagagcagcgct

SEQ ID NO: 442 - protein, 436 aa, Oryza sativa; identical to SEQ ID NO: 108

SEQ ID NO: 443 - DNA, 984 bp, Oryza sativa
atggccgcggcgccgggcgaggttagcggcggccaaggcaacggcggcgtcaccgccatcgccgagctcaccatctcctcgctgccgctggagacgcgatgcgcgccgttccccctgcgtcagcacggcggcttctggctgccggagacgttcctcccggggctcgaggccgcgcgcgcgcgcttcgagccgcggccgtccgacgtcctcctcgcgagcttccccaagtccggcaccacctggctcaaggcgctcgccttcgcgacgctcaaccgggccgcctacccgccctccggcgagggccacccgctccgccgtcgtggcccgcacgactgcgtgcagttcctcgagtcggcgcttgtggtgtccgacgacatgtttgcttcactcccttcgccgcgtttactgtctacccacctgccttactccctcctgcctgagggcgtcaaggcggatagctccggctgtcgtatcgactacatttgcagggatcccaaagacgtgcttgtctcctggtggctgtttaccaagaaggccttgggcactcaagatggacctaccaacggaggcaacaagccaatgctttccaacggaccatactggcgccacgtgctggagtattgggcagagagcaagaggaggccacagaaggttctcttcctccgctacgaggagatgacacgagagacgacgagcaacgtgaggaagctggccgagttcatgggctgcccgttctccggcgaggaggaggcagacggcgtgccggacgccatcgtcggcctctgcagcttcgaccatctcaggagcttggaggtaaacaggaatggtgccaatgatttcaacatcaaaaacgactcgttctaccgaaagggggtggctggagactgggccaattatttgtcacctgagatggcggcacagctggatctggtcattgacgacgagttgcggtcctctgggtttagctttgccaccggtggacgg

SEQ ID NO: 444 - protein, 328 aa, Oryza sativa; identical to SEQ ID NO: 114

SEQ ID NO: 445 - DNA, 495 bp, Oryza sativa
atggcaacctccagcttgctagtagctgcagtgctcgcggcggcggccatggcggcgacggcgcagaactcggcgcaggactacgtggacgcgcacaacgcggcgaggtccgacgtcggggtggggccggtgagctgggacgacacggtggcggcgtacgcggagagctacgcggcgcagcggcagggcgactgcgcgctggagcactcggactccggcgggaagtacggcgagaacatcttctggggctccgccggcggggactggacggcggcgagcgcggtgtcgtcgtgggtggcggagaagcagtggtacgaccacgacagcaacagctgctcggcgccggcggggagctcgtgcgggcactacacgcaggtggtgtggagcaactcgacggcgatcggctgcgcccgcgtcgtctgcgacaacagcctcggcgtcttcatcacctgcaactactcgccgccgggcaacgtcgacggcgaatctccctac

SEQ ID NO: 446 - protein, 165 aa, Oryza sativa; identical to SEQ ID NO: 24

SEQ ID NO: 447 - DNA, 654 bp, Oryza sativa
atgctcagcttctcgtcctccgcctcgtcgtgctcctccggcggcggtggcgccgccgtggccgctgcggcggcggctggcggggcgatgccgctgtactatggcacgcctgcttcttgctcaggattgagctcagtgagcttgagcagcagcatgcagggtgcaatggccagggtgaggggtcccttcacgccgtctcagtggatcgagctggagcaccaggcgctgatatacaagtacttggctgctaatagccctgtaccacacagcctcctcatccccatcaggaggagcctcacatcgccctactcacctgcctactttggctcaagcacattgggatggggatctttccagctgggctactccggcagcgcggatccggagcccggccggtgccgccggacggacggcaagaaatggcggtgctcgagggatgcggtcgccgaccagaagtactgtgagcgacacatgaaccggggacgccaccgttcaagaaagcatgtgggaaggccagcctggccatgcccgggaaagcgatgcccgcgggcggtggccagcagcccgctgcctctgctacccagcctagtgctccggccgcccacagtggcggagctgttgctggcctcgctatcaaccatcagcaccagcaaa

SEQ ID NO: 448 - protein, 218 aa, Oryza sativa; identical to SEQ ID NO: 6

SEQ ID NO: 449 - DNA, 486 bp, Oryza sativa
atggccccggttgccgtgggcgacaccctccccgacggccagctggggtggttcgacggggaggacaagctgcagcaggtctccgtccacggcctcgccgccggcaagaaggtcgtcctcttcggcgtccccggtgccttcaccccgacctgcagcaatcagcatgtgccaggattcataaatcaggctgagcagctcaaagccaagggtgtagacgacatcttgcttgtcagtgttaacgacccctttgtcatgaaggcgtgggcaaagtcataccctgagaataagcatgtgaaattccttgccgatggtttgggaacatacaccaaggcacttggtcttgagcttgacctttcggagaaagggcttggtattcgttcgagacggtttgctctccttgctgacaacctcaaggttactgttgcaaacattgaggaaggtggccaattcacaatctctggtgctgaggagatcctcaaggcactg

SEQ ID NO: 450 - protein, 162 aa, Oryza sativa; identical to SEQ ID NO: 8

SEQ ID NO: 451 - DNA, 606 bp, Oryza sativa
atgttctccggcgccgggtcgtcgtcgtcgggcgcggggacgtcggcgggaggcggcggcggcgggccatcgccgtccagctcgtcgccgtcgctgagccggtacgagtcgcagaagcggcgggactggaacacgttcgggcagtacctgcggaaccaccggccgccgctgtccctgtcgcggtgcagcggcgcgcacgtgctggagttcctcaagtacatggaccagttcgggaagacgaaggtgcacacgccggtgtgccccttctacggccaccccaacccgccggcgccatgcccgtgcccgctccgccaagcctggggctccctcgacgcgctcatcggccgcctccgcgccgcctacgaggagaacggcggcacgccggagatgaaccccttcggcgcccgcgccgtccgcctctacctgcgcgaggtgcgcgagacgcaggccagggcgagggggatcagctacgagaagaagaagcgcaagaagccctcgtccgccggcgccggagccgggccctcgtccgaggggagcccgccgccacccggcggctcggccagcggcggcggcgacacgtcggcgtcgccgcagttcatcatcccg

SEQ ID NO: 452 - protein, 202 aa, Oryza sativa; identical to SEQ ID NO: 118

SEQ ID NO: 453 - DNA, 393 bp, Oryza sativa
atggtgctcttacaaacagaagaacactctaggcgcacgtacaacaacaaagtagcagcaccattctttctaccgcacggtcttcacgtgaacgatatcacgcgccggtcccggtggccccggcgtcggcgccggcgccgtggccgacctgcttggcgtcgaaggcgcggtcgtccaccttgcgcgcggcgggctcgtcgaccttgtcctgcaccttgtcgatctggatggcgccctggtcctcccgcgaacgcaggtccgtgcgcgtgcggttctccccgccgcccaccgactcgtacgtcgtcggcgtcgtctcgcccatcggctgcgcgccctgcgcccccgacattgctgcaaaaggcttggctcggctgctgcttccttcctttacgc

SEQ ID NO: 454 - protein, 131 aa, Oryza sativa; identical to SEQ ID NO: 122

SEQ ID NO: 455 - DNA, 660 bp, Oryza sativa
atgacggccgccctgcaagcgctgctcgacccgacggcgctgtccttgggcctgcccacgccggcgatcaacaaggaggagtacctcgccatctgcctcgccgcgctcgcctgcacgcgggcggggaaggccctggtgggagtgggaggccagcagcaggtgcaggcctgcaataagtggctgtgcccagcgcccgcggcgcctgaggagctccgcttccggtgcaccgtctgcgggaaggccttcgcctcgtaccaggcgctcggcggacacaagtccagccaccggaagccgccttccccgggagaccactacggcgccgccgccgcggcgcagcagctggcatccgctggtgactcgaaggaggactcggcgtcgtcagcggccgggagcactggcccgcaccggtgcaccatctgcaggaggagcttcgcgacggggcaggcgctcggcggccacaagcgctgccactactgggacggcacgtcggtgtccgtctccgtctcggcgtccgcgtcggccgcctcgtcggccgtcaggaacttcgacctcaacctgatgccgctgccggagagcacagccgccgccgggatcaagaggtgggcggaggaggaggaggtgcagagtccactgccggtcaagaagctcaggatgtccaac

SEQ ID NO: 456 - protein, 220 aa, Oryza sativa; identical to SEQ ID NO: 124

SEQ ID NO: 457 - DNA, 588 bp, Oryza sativa
atggacggcgcggccgactccggcacggcgggcgccgcggcggcggcggccaagtggcggaccgatgcctcgcgggcgttccagtactacctggaccgctccaccccgcacgccacggggcgctggatcggcaccctcgccgtcgccgccatctacgccctccgcgtctacctcgtccagggcttctacatcgtcacctacggcctcgggatctacctcctcaacctcctcatcggcttactctcccccatggtcgaccccgaggcccacgccgctgcctcctccgacggccccgccctccccacccgcgggtccgacgagttcaagcccttcatcaggcgcctccccgagttcaagttctggtatgcaatcccaaaagcttttcttatagcttttgtgaggactttcttctctgtatttgatgttcctgtcttctggccgatacttctctgctactgggttgttctttttgtcctcccgatgaagcgccagattgtgcacatgataaaatacaaatatgttcccttcagcgttgggaagcagaaatatggcgggaagaagagcgcaggcagcagttttttgaaagac

SEQ ID NO: 458 - protein, 196 aa, Oryza sativa; identical to SEQ ID NO: 126

SEQ ID NO: 459 - DNA, 813 bp, Oryza sativa
  misc_feature (523)..(523): n = any nucleotide
atggccgcggctgcggagacctcggcgaaggtgggggcgccgagaagatggtctcttcaagggaagacggcgctcgtcaccggcggcacccgcggaatcgggcgtgcggtggtggaggagctggcggcgctgggggccaccgtgcacacatgctcccggaaggaggaggagctgagcgagcgcctcaaggagtgggaggcccggggattccgcgtcaccacctccgtctgcgatctctcggttcgggaccagcgtgagcgcctcctccgccaagtcgctgacctcttcggcggcaagctcgatatcctcgtaaacaatgtggggacaaacataaggaagccaaccactgaattttctgccgaggaatactcttttatgatggcgactaatcttgaatctgcgtatcatctgtgccaactttcgcatcctcttctgaaagcatctgggtcagggagcattgttttcatatcatcagtctgtggattggtagctgtatttagtggttctctctatgctatgacanaaggtgcaatcaaccaattaaccaagaacctagcatgcgaatgggcgagaggcaacatacgatccaactctattgccccgtggtatatcaggacttcacttaccgaaggacttttggcaaataaggactttgaaggtgctgtggtgagccgaactccacttaggcgtgttggagaacctgaagaagtatcatcgctggttgcttttctttgcatgcctggttccagttacattactggccagacgatctcggttgatggaggtatgaccattaatggactctatccaagt

SEQ ID NO: 460 - protein, 271 aa, Oryza sativa; identical to SEQ ID NO: 128
  X_region (175)..(175): Xaa = any naturally occuring amino acid

SEQ ID NO: 461 - DNA, 735 bp, Oryza sativa
atgcgggtgctcccggcgtcgtggtcctccgccgcctcctcctccgcctccgcctccgcggaccgcctcaactcccccaccccggcgccgccgccgccggcccctcctcctcctgctccaaaaagcagcagcagcagcagcgcggagctgtacctcaacatctacgacatctccccaatcaaccactacctctactggttcggcctcggcatcttccactccggcatcgaagtgcatggcatggagtatgggtttggagcccatgaatacccaaccagcggagtcttccaagtagagcccaaaagctgtcctggctttatcttcagacgctccgtgtgcgtgggttccactgatatgtctcgttcggaagtccgcagtttcatagaggatcttgcagaggattatcacggggacacttatcatttgattgcaaagaattgtaatcattttacagcagacatctgcaagcgtctgactggaaagccaattcctggatgggtcaatcgacttgccagattaggttctttctgcaactgtgtactgcctgaaagcatcaaggtttttgctgtcaaagatgtaaccgatccccccgagtttcctgatgatgatatggagtctaatgcatccattgttgacggaagtgatgcggatgatttagaccatcttctaataaccccaagtagcgatgttgtatcttcaaaagataagatattaactcctggcagggatagcttg

SEQ ID NO: 462 - protein, 245 aa, Oryza sativa; identical to SEQ ID NO: 130

SEQ ID NO: 463 - DNA, 1761 bp, Oryza sativa
atggcgagcaggctcaaggaggacgagaggaacgagcggatcatacgcgggctgctcaagctgcccgccaacaagaggtgcatcaactgcaacaatttgggaccacaatatgtctgtacaaatttctggaccttcatttgtaccaattgcagtggagcacaccgagagttcacgcatcgagcgaagtcagtttctatggctaaatttactgcacaggaagttagtgcccttcaagaaggaggaaatgagcgtgctagagaaatattcttcaaggaatgggatgctcaccgcaattctttccctgacagcagtaatgcggataaattgaggaactttattaagcatgtttatgtggaacggagatacacaggagaaagaagtgcagatcggccaccgaggggaaaggatgataaggatgagtatagtgaaaacaggagatctgatggaaattggggtggttcaagaagtccgccatacaatgaaagctattctgatcgtcgcagttatagtggaaggagcgatgacagaaattccagatattcctatggagaacgaagtcctggctatgaacataatgattataagaaaagcccccgctactttgaagttgatgatagaaatcgtgaggatagatctggaaaaacaactccagttcaacggtttgaggaccgcaggccttctgaaccacagaggccagataatgggtctccaaattaccagaaggaaaccgatggatctagccctgttgtacggccagtgagggatatactgggtgataatgcacctcaactacgggttggtgagcctcctaagccaaatgtagcgagaacgattgatcctccgagaccaatcgatcctccaagaccgattgatcctccaagaccgattgatcctccaaggccaattgatcctccaagaccaaatggaaccagaaccatcgaacctccaccacagatgcagaggacatcaactgccagcagtattggttcttcagaggggacctccgaacagataaaagtggcaagtacgataagtttaattgatttcagtgctgatcctgagccttctgcatctgtgccacctccacaatctacacctacatcacaacagcagcctgctagtgcacagccagtgcaacctgttaatgcaccagcacaacagcctgctgtggaacaagggaaaaatgtgtcatcagtgagcagtggtggtggtgactgggcatcgtttgattctttcggccagcaacaaacaccacaaactggcaatagtgtagatccccttgagtctgcacttgctcaactatcattttctgaaacaccctctgcacccaattcatcagcttttccagcttcggtcatgcccacttcagttccaaatgatggagggtcatccatgatggggcagtcacattcttcattttttggtgcaccccctggagtctcaggtcaccaggcctcaacaggaatgtctatccatggatcttcagttcaacaaactggtctagctgctccggcagctggacttccgttccaggtctctgcgaattcccgagcaactagtggcattcaagaagcagcacctaatactgacagtagatccattggccggaaagaacttccagcggatatctttacttcgttatatccaccaggacctcaaacaatagggggttggcagagaacaccccaatttggaatgggatatgccatgccatatcagactgcaatgggaatgcaagcatatcctcagatggcgtttgct

SEQ ID NO: 464 - protein, 587 aa, Oryza sativa; identical to SEQ ID NO: 134

SEQ ID NO: 465 - DNA, 441 bp, Oryza sativa
atgcatcaagtttgtttaagcgcaggtgtagccactggggacgcacttgccacagtagttgacaaggaggctcagcttcaccgggatgttgacgacgacgccgagcacgttggccttgatggccgtgcagaggcagacggcggcctcgaggtcggcgaggccgctgatgaggctgcagcacggctgggcgggcacctggccgacctcgccgctgatggcgcccagcacgtcggcgcaggccccgaacttgagcgtgttcacggggcacttgttatggtaggacggagtagttggagtcggaggcggcggcggcgggagggccgggggcggcggcgtcgggcatttgccgcacgcgcagccgcaggcattggccgtcgtgaagaagaggaggttgatggccaagagaaacacgaggatcttggatgccatggagcttatcct

SEQ ID NO: 466 - protein, 147 aa, Oryza sativa; identical to SEQ ID NO: 138

SEQ ID NO: 467 - DNA, 726 bp, Oryza sativa
atggtgccgagggtggagcgcggcggcggcgggttccatctccccaacagcgagcgggaggactcgctgttcatccgcgcgctcatctccgtcgtgtccggtgacaccacggtgccgacgctgctgccggagccgacgatggcgaccgtggttgccggtgcggctacgtgcgccaggtgcggggtggacgggtgcatcggcgtggactgcgaggtggtggtgttggcggcggcggctggctcgagctgcagcgacgaggaggatgagggggagtgcaccacgggcgcggtggccagcggcggcgtgacgggcggcgtgggcaagaggaggccgcggaggcggagcggcggcgaggggagcaggtacaggggcgtgcggcgtcggccgtgggggaagtgggcggcggagatccgcgacccgcgccgcgccgtctgcaagtggctcggcacgttcgacaccgccgaggacgccgcgcgcgcctacgacgtcgccgcgctcgagttccgcggccagcgcgccaagctcaacttcccggcgtccacggccgcgcagcagccacgtccactcctccatcacaacctccgtgagaactgcggctcgaacgcgtcgtcgccggtgcacgcgccagagcacgcgaggacggcggcggcggcgaaggaccaggagatctgggacggcctacgggagatcatgatgctcgacgacggcagcttctggtccatgcca

SEQ ID NO: 468 - protein, 242 aa, Oryza sativa; identical to SEQ ID NO: 140

SEQ ID NO: 469 - DNA, 516 bp, Oryza sativa
atgcagagccagatcgtgtgccatgggtgcaggaacattctgctctacccgagaggggcaccgagcgtttgctgcgcggtgtctcatgccgtgtccagcacagcaccgtctccaggaatggatatagctcatcttatatgtggtggatgccgaactttattgatgtatactcgcaatgcgacatctgttagatgttcgtgctgcgatacagtcaatcttgtcagaccagtgagtagtatagctcacttgaactgtggccagtgccagacagtgttgatgtatccataccgagcaccttctgtcaagtgtgctatctgcaattttattacaaatactgggatgaatacaatgagacatttgccaccaaatggaacttcatatactgccccatcaacctgtgctccaaccactcaatcacagaatgttactgttgttgttgaaaatcctatgacggtagatgcaaagggaaagttggtgagcaacgttgtagttggggttacaactggtggtaaaaag

SEQ ID NO: 470 - protein, 172 aa, Oryza sativa; identical to SEQ ID NO: 142

SEQ ID NO: 471 - DNA, 852 bp, Oryza sativa
  misc_feature (391)..(391): n = any nucleotide
atgcgaggatggcaagaagtatggagcggagaacacttgcaccagcggaagcacgctgtcgaaggcggcgttgtgtttcgccaaagcacgctcactgatggagaaggagagagggaacctgctgaaagcactgggtactcaggtggcagaaccgtgagggctatggtgatgggagctccttttggagatgctcgccatcttgcccaaagatacgacaggatgcgtcaggaaaccgaagcacaggctattaaagtctcgaagcgccaaatgaaatttagagaaacatctgggaagggtgatatgatttcaagattagaggctgctgaatcaaagttgcaagagttaaagtcaaacatgggggttctaggcaaggaagccgttgcatcaatgnctgctgttgaagctcaacagcaaagactgaccttgcaacgactaattgcaatggtcgaatctgagagaagttatcaccagagggttctgcagattcttgatcaacttgaaagagagatggtatctgagcgccaaagaattgaaggagcacctcctccagctgttgagagttctatgccaccaccaccttcatatgaagaaattaacggtgttttcatgaggaatccaacagtcgctgaattggtggaaactgtggaattcttcttggctgaggccatccagtcttatcgtgctgagagtgaaactgagctcaacctggcagctggtgactatatagttgtccggaaggtgtcaaacaatggatgggcagaaggtgaatgcagagggaaagctggctggttcccttacgactacatcgagaaaagggaccgtgtgcttgcaagtaaagtcgcccaggtcttc

SEQ ID NO: 472 - protein, 284 aa, Oryza sativa; identical to SEQ ID NO: 144
  X_region (131)..(131): Xaa = any naturally occuring amino acid

SEQ ID NO: 473 - DNA, 490 bp, Musa acuminata
  misc_feature (4)..(4): n = any nucleotide
  misc_feature (64)..(66): n = any nucleotide
  misc_feature (74)..(74): n = any nucleotide
  misc_feature (76)..(76): n = any nucleotide
  misc_feature (83)..(83): n = any nucleotide
  misc_feature (98)..(98): n = any nucleotide
  misc_feature (103)..(103): n = any nucleotide
  misc_feature (107)..(107): n = any nucleotide
  misc_feature (111)..(111): n = any nucleotide
  misc_feature (115)..(115): n = any nucleotide
  misc_feature (124)..(124): n = any nucleotide
  misc_feature (131)..(131): n = any nucleotide
  misc_feature (141)..(141): n = any nucleotide
  misc_feature (164)..(164): n = any nucleotide
  misc_feature (179)..(179): n = any nucleotide
  misc_feature (183)..(183): n = any nucleotide
  misc_feature (237)..(258): n = any nucleotide
  misc_feature (352)..(352): n = any nucleotide
  misc_feature (367)..(367): n = any nucleotide
  misc_feature (440)..(440): n = any nucleotide
  misc_feature (445)..(445): n = any nucleotide
  misc_feature (463)..(463): n = any nucleotide
  misc_feature (469)..(469): n = any nucleotide
  misc_feature (473)..(473): n = any nucleotide
  misc_feature (486)..(486): n = any nucleotide
catngtggacaagccactgaaacaggacgacgctcgctctctctccccttcggagagggctacnnngggacgcncnttgctgngcccccatggctccncaacntttncacncccncacagcttncttcaancacacttgcntagcccgccggatcgcctttgcntttcctgcgggaacntgtnccaggcttgttctcaaggttttattcttcttctgccattcattgatggcgtacnnnnnnnnnnnnnnnnnnnnnngatcaaaggaagttaaggcgagaggtgtaggtggccttgggagaccagtttcttggaatcacgtcccgggctgagagggtcctttgggtggtcnatgtggtgagcttcnctgagaatggcccctgcagaggccccccaatgatgcaccaactcgctccccacacgtgcttcatctctagccncttcntggaatttgcttgttttntatgcntggntccgatatctccntcat

SEQ ID NO: 474 - DNA, 732 bp, Musa acuminata
  misc_feature (4)..(4): n = any nucleotide
  misc_feature (16)..(16): n = any nucleotide
  misc_feature (646)..(646): n = any nucleotide
  misc_feature (655)..(655): n = any nucleotide
  misc_feature (668)..(668): n = any nucleotide
  misc_feature (677)..(677): n = any nucleotide
  misc_feature (694)..(694): n = any nucleotide
  misc_feature (722)..(722): n = any nucleotide
  misc_feature (727)..(727): n = any nucleotide
ctcnctcgcgatctanaaccggacgtgtgggttttttttttattagtagataaagcatatcatttacttgattcaagttctcagttgccaaaaacaagagcgttattcaaccaaagctgcatcaaaggtaactccaacttcaaatattcatatcatcaagatagcacacctaacactggtcggatgacaaccagtggacataacagcaacatgccacgaaactaaacattcctagagtgccttaaggatctcttctgcgccagatatggtgaatgctccaccttcttcgatgtttgcaactttaaccacaaggtcatcagcaaggagagcaaacctccgtgatcgagttcccagtcctttctctgagagatccagttccaagccaagagcatgagtgtaggtaccagagccatcagctaggaatttcacatttttgttttcaggatatgtctttgcccatgccttcatcacaaacgggtcattaacactgatgaggaggatctcatcaacgcccttggatttcagctcctcagcgttttcaatgaagcccggcacatgcttcatgctgcaggtaggagtgaaggcaccggggacgccgaagaggatgaccttcttgccggcggcgagggcgtggacagacaactgntgaagtggncgttctcgtcgangcacgcaangtccttgggaagcgatngccaccggatggagcatttcggtcttgngttcnccttc

SEQ ID NO: 475 - DNA, 568 bp, Musa acuminata
  misc_feature (537)..(537): n = any nucleotide
  misc_feature (544)..(544): n = any nucleotide
  misc_feature (558)..(558): n = any nucleotide
ctgcttttccactggattgtggtaaacaattcaaacttaatgacggttggacagaagaaaattgacatttttctgagacattggtcaagaattcatctctgaaattaatgtctttgtccgccgctactactactctcaatattggcaccatcagagaccagtgtaaactctggttcgatactttcatctcatagagctgctagttgaatcatctatgccactatgcctgggacatccacagctatctgaagaggttctaagtagcagacaatgtctctcataagaagcctcgcctttggattgcggttgaggcagtagtgagctagcatggctatcttttgaacggctttatctggacaatttccactcaacctggggtctacgatccccaacactttcttcttgtgtgtaagcaatggtgcagcccagtcagcaagcatctgctctcgaacaggacgagacttgtccagtgatttccttccggtgaggagctcaaggaggaccataccgaagctgtaaacatcactcatggtggtnaatgccntgtcatgatatacnctggtgctgc

SEQ ID NO: 476 - DNA, 634 bp, Musa acuminata
  misc_feature (11)..(11): n = any nucleotide
  misc_feature (13)..(13): n = any nucleotide
  misc_feature (580)..(580): n = any nucleotide
  misc_feature (609)..(609): n = any nucleotide
accataaatantngatccattatcatgggaacaatcaaacatccttttgagaaccactcgcctcttcaacaatcgaacatcaaaagtagatccgcgagcagcaaaaaatgaggacattttccatgtccatcacaccaacgcgtctactgctctcgcttcttctccgacagatgtttcagcagatcggcagtgaactgctccatgttcttgcttgacgaaccacacggagtcaccgcactcttgaccgcccgttgagcttcctccatctccttcctcagcgcaccgcctactcctcctcccatcaggctgtcgatcctcctcgagacttccgccctgctcacctcgccgatacttccgacatcgatccctatcctcaggtcctccaccaccatcttccggttcgtcggctggtccgcaaacactgggaagcacagcatcggcaccccgcaccacatgctctccaggatcgagttccacccgcagtgcgtcaggaagccgcccaccgccgggtgcagcaggacttgcttctgacggcaccacgggcaccaccatccccctccctttgcatgcatcgatgaanccctcgggaagtggggtggctccgaactnccgttcctggccgaagcacccatat

SEQ ID NO: 477 - DNA, 555 bp, Musa acuminata
  misc_feature (542)..(542): n = any nucleotide
aggatttaaatatgtatggctacacttaaacgtactattaattcatatatctctctatcttcatgatcttttatcaccattaatcatcaacaaaagtcgtctcctcaattgaagagagcacagtcgcggcggatgttgccgttggctccggtcttgacgccgacacggccgagcttggtgatggcagccacgaacgcccggtcgaaggccgcaacgctctgcgcccacgagtccaccaccgggcgggtccgggcgtcggtgaagagcacctggtccgaggtgaaaagccccatgccctgctgcaggttcttgtagtactggttgtcgaacgctcgcggcgtgacggggtccatgttgacggccacccgcgggtccacgtctctggggcacatggcctggagctgagccgcgtacgccctgttcagagtcggatccactggtttctgctggctgaagtcgtagatgcggctggcgaaactgctgcagtgggagaacccgagcgtgtgtgccgctgacagagcgatcatatccgactgcgagangccgtttgccgca

SEQ ID NO: 478 - DNA, 490 bp, Musa acuminata
  misc_feature (11)..(11): n = any nucleotide
  misc_feature (14)..(14): n = any nucleotide
  misc_feature (17)..(17): n = any nucleotide
  misc_feature (24)..(24): n = any nucleotide
  misc_feature (190)..(190): n = any nucleotide
tagaatgatantgntgntcagagnatgaacacagtgggagtaatcctgtgctttcatctcaaagatggctgcaggattccccttcagcaacaatagttacaagatgtggcaagaaatccagtgaataatgatttcaagccttctcccagaagaggagacaacactagaaatgatagggaaggaaaacaanaaagagaaaaactgctctgccttgagataatacttttgtccttgatcatggagagtaaaagattcatccatgataactgcttgttcattgagcttcaccatcctgggaggattgcttccactcctccaggcgacgcaaaaacttcagaacctcagctggttctcgaagagaaaaagaggcatttgtttcctttgcaatcttggtgacaagaatgccaaggccttgtcctctatcacgcaacaccttgaaagcatcttcgtcggttcgatcgtcccctatgtagaatggaaatacatcatg

SEQ ID NO: 479 - DNA, 675 bp, Musa acuminata
  misc_feature (97)..(115): n = any nucleotide
  misc_feature (484)..(484): n = any nucleotide
  misc_feature (571)..(571): n = any nucleotide
  misc_feature (577)..(577): n = any nucleotide
  misc_feature (580)..(580): n = any nucleotide
  misc_feature (587)..(587): n = any nucleotide
  misc_feature (601)..(601): n = any nucleotide
  misc_feature (611)..(611): n = any nucleotide
  misc_feature (619)..(619): n = any nucleotide
  misc_feature (652)..(652): n = any nucleotide
  misc_feature (656)..(656): n = any nucleotide
  misc_feature (670)..(671): n = any nucleotide
agtggattggacatagtggctgccaacgattagatcaaggttttgatccggagaacatattcatgtgcagcctctcgctttgatgcttcagacacannnnnnnnnnnnnnnnnnntctttacacgcagcacgaagttgcagacagagaagaaaacatggctatggggattaactatatctaaactgttctgtatcttttctgagacacaacaacgaacacctgtcatatggcgtcggatttgggcttcccgttgctcatctccgtctccgccttgcccacatggacgtcctcgtccgcgatgaacttgctccagaaccagtgggacctccagaccaggatcatctcctcgatgggcacgttcttggtctcgggcaggaagatggagatgaaggtggtcatgatgagcacccacccggcgaagaagtagaagaggccaaacttcatgtggcagagcatggtgaggaaagcctgcgcgatggcganggtgaagaacatgttgacggacacgttgatgctctgccccgccgaccggatctccagtggaaatatctcgctaggaaccaaccagcncagggntcnccatgancaggcgaacccggngacgtagatncagatgcngagcaccacgaatgccgcgtaagccttggacangtgnccctctccgttggnnccga

SEQ ID NO: 480 - DNA, 530 bp, Musa acuminata
  misc_feature (8)..(8): n = any nucleotide
  misc_feature (22)..(22): n = any nucleotide
  misc_feature (248)..(248): n = any nucleotide
  misc_feature (251)..(251): n = any nucleotide
ctattgcnttttatatcttcantaattccattttgttgacattgcagaggaggaggaatagttgactgttgtaagaccttcatgccaacatcaagcatgaggaagccgcagcatacacgtcaagcactgatggctttcacgtacgtgcactcctggagttggacgtcgtccatgggcgaggcgtcggtggggaacggacacggctgagctccgtcaccctgatccgccagcgacgcacaagccgcagngancaccccactcgagaccccttcgacgtcggcgcagtaccacggtagcttcctcgccttcctcaactccacggtgacgttggagatgcagatgccggtgaagggcgcgttggggatcccctccagcctcgccgccatggtcacgttgtacgccgtcacctcgctgtagctgatcccgtccaccacggggatcgcgttggggtcgaacttgtcgtcggggtgggacttgtagttgcccgtcatccagaacacccacttcatcgtgctcaggtacatccgtcg

SEQ ID NO: 481 - DNA, 641 bp, Musa acuminata
  misc_feature (8)..(9): n = any nucleotide
  misc_feature (12)..(12): n = any nucleotide
  misc_feature (14)..(14): n = any nucleotide
  misc_feature (16)..(16): n = any nucleotide
  misc_feature (21)..(21): n = any nucleotide
  misc_feature (23)..(23): n = any nucleotide
caacaacnnaancncncctgnanattagcactaagaagattaatagtaaaaggatattgtacagtaactttcgtggttacattagaaacagtgacaaagataagaaagcacacaaataagtcagatgtcatctctaccaatccttaatggcacatcatttgaatgcacaaaatcaccgtttggtttctttagaaggtggtgatctgcatcttcttcatcgctttcgtctatcaatgatgaagcatatgaatctgaaccatcttcagaataagctggattagcaggtacttgtccaactgctgtaacctgaatattctctgggagaatacagttgcagaatgaccctaatctggcaagtctatttacccatcctggaataggcttgcctgtcaaacgcatgcaaacttcatcagtgaaatgattgcagttcttgatgatcaagtggtaggtgtcaccatgatattttccagcaaggtcttcgataaatacacgaaattctgaacgagacatatcggtggtacccaaccacacagaccgtctgaagataaaaccaggacagcttttcggttccacctcaaatactccactagacgagtaatcgtgtgctccgaatccatactccatgccatgaacttcgatcc

SEQ ID NO: 482 - DNA, 734 bp, Musa acuminata
tctttacatgacataatgtgctgagtctagtttgagtgcatgcctacaagcaacattatcgacacaaaactaagacgggagagctatcagctgtaaagatagaatacagtggtcacaccagagaaagatcaacctatctcagacagaattgcactgaagacaaaatctcccagaaacatactgcttgctttggttctctggattatttattggagtcttgtgccaaaatgacagcaaaaacatcaagttatgtggtctctgatgcactgaggtctccccagcgaacattgtaatttgcggcaaggtagtgtgctcctactggtccgcgactcccgtaagggtagagctcagggcctatcttcttctcttccaactctttgagcagtggtgtgaacagctcccaggcagcatccaattcatcagaacgaatgaacagccttcgttcaccctcaatggcatcaagcagcagcctctcatatgcatctggtatctcttttgagtatcttgatgcataaagaagattcagattactgcggtccaatctcatccccaatccgggaatcttgttattgattttcaagtaaatagcctcatcgggttgcaccctaattacgagttcatttgtagctcgatcaagatcagttccaaaactacgcttgtatagattgccatggacattgcgaaactgcactctaatctctgttcgacgattgtggaatgcttttccagcttta

SEQ ID NO: 483 - DNA, 551 bp, Musa acuminata
gttcatcaagctgcgagtgtagaacaaatttttagggtctcaaagatctgatatcctgtatcagcttctcgaatgccgtgaaggatgagccgccggtggaggagacgctgtctcttgccatctccgccatcttagcggcggatgtcctcaactcttctgccttgtttccctccatcatctccctcaccatcttctccacgatgtccctgccgtgcatgtccttcatgtccaatcctaccctccacacctcccccacgaacctgctgttggtctgctggtccgcaaagaatggccagcacagcatgggaacgccggccaccaggctctccagcgtcgagttccatccgctgtgcgtcaggaagcaccccaccgctgggtggcccagtacctcctcctgcggtacccactccaccaggtaccccctctccctcgtcgctttttccagctgcgctgctatcgctccggcggcggcggctccctcgcccaactcttttccgtcgaccaggtcccgcctcaccacccacaggaaccgttgcccgctgttgaccagc

SEQ ID NO: 484 - DNA, 558 bp, Musa acuminata
  misc_feature (512)..(512): n = any nucleotide
cattggttagattggttgattgacatatctaagaaattggttcacactcccaaataagtagttgaattgccgtccaacttcttactttatagatatagcatcaaggcaggaaccttttaggaaccaagttaagaatgtaacatacggataggtttgtttattatgcttatactagcggatccttggggacggcaataaggcgaagagggatcttctttggagtgacgagtccaggagcttccgacatgtccaaatccaccgggttcaagccgtcaggtaattcccagttgaagtgatacaggaggttggccagagcaatctcgatggtggccatggcgaagttgattccagggcacatccttcgtccagctccaaatgggatgaacaggaagtcattgcctctgtagtccacggcgttgtccatgaacctctcgggtttgaactcctctggtgcttcccaggacttgggatctctcgctatggcccaggcgttgacgataacccttgttttngccgggacatggtaaccctgcaacgagaagctgctcatggtctctc

SEQ ID NO: 485 - DNA, 548 bp, Musa acuminata
  misc_feature (6)..(6): n = any nucleotide
  misc_feature (8)..(8): n = any nucleotide
  misc_feature (454)..(454): n = any nucleotide
  misc_feature (526)..(526): n = any nucleotide
ctttcncngatgaagaatggaagacgcctccagtcacaaaagtacacaaggaaggggcactcggagaaacatggaacgtctagccactctttccttcccctgttacagagagatcagcaacgatggtgttcagtgtgagttatcccatgaagtccagtcggcggcactcccgactctgggcatggagttgatcttggcgaacgtgtccaccttgaagctggcgccgcacatcaccccctcgctgtctaccctcggcatcgccttcagcctgttcaacgggtgctcgaagctcctcaaccctccgtcgctgtgaaacatgcatccagtagggaacggagcgtaggatttgccgcagctctcctttgtgatttccctgtcatcgcaaattacgatcgagctatccgctgcaacgccccagtacagaggtattcctccatcggagctcagcgcacanagaacggtgctggttttgttgtcgtagacgacgaaggcgaaggagccgctgaagtccttcacgactggtcgncgggtacggccgcggtcgggag

SEQ ID NO: 486 - DNA, 617 bp, Musa acuminata
gtccgacaaagttattattcttgtctatttattctagcttatgaatatgatcatccattgtgcttcatacacttgcagttggaatatcttgaggaacgccgtctcaaagacttgataaaaaagcactctgaattcatcagctatcccatctccctctggtcggagaagacaacggagaaagaaatttctgatgatgaggatgaggaggacaaaaaggacgctgaggaaggtaaggtggaagatgttgatgaggagaaggaagagaaagagaagaaaaagaagaagattaaggaggtttctcatgaatggtctttggtcaacaagcagaagcctatctggatgaggaagcctgaagatatcacaaaggaagagtatgccgcattctataagagtctcactaatgattgggaggagcacttggctgtgaaacacttctctgtggaaggccagcttgagtttaaggccattcttttcgtgccaaagagggctccttttgacctctttgacacaaagaaaaagcttaacaacatcaagctttacgtccgtcgtgtcctcatggattccaagcttgagattctttgagaacgcctcatagaacttgttgtagtcctctttgt

SEQ ID NO: 487 - DNA, 576 bp, Musa acuminata
  misc_feature (558)..(558): n = any nucleotide
cttacacaaaatcaaggaacaattaattcattacatcaagacaagcatacataagatagccagcatgggggtaattaaccataaacatgtcccccttttaacttatatatgtatatactatcagaagttgcaactttggcagtggcatattgcgtataatttacaaaattaaaagaatatggtgccaggggcattgcatcggttgtccagcaaattcgataacttcaatctccaactttacaatcttaaataccaagacgatatgtggaaacaaatgtcacttttttccggtggtcactccgacaacaagattgctaaccagtttgccactttcatcgactgacattgggttctcaacaacaaccgtcgtgttttgcacttgagaagcagaagctgaaggtggcgcaggtgtcggtccattaagcctatgcatggttgacaccgggagtctcataccatccatctgcccgacatttgtcacataatgacatatggcacacttgacagatggtgctccgtaaggatacatcagagttgtatgacaatggccacatctcnacgttagcaacctgattt

SEQ ID NO: 488 - DNA, 572 bp, Musa acuminata
  misc_feature (5)..(5): n = any nucleotide
  misc_feature (569)..(569): n = any nucleotide
ttatnaatcatctgttcttttatgagtcaaagaatactgttcttcagattcactacgaaagtgttgggcatcatagccatgatatgaactgtgagacagggttgaaagggtgatacaccaaagtctggaattacatcaactttttcacataaatgaactaacaaatccatgtaattagaacatgtagtcatcctgatcgccggctcgtctgctagtctcttgtccatctcccccagccattctgttgttcatcttgaccctcttgaccagacgaactagggcttgcacgacctcggacatgggtggtctgaattctggctcagactgaacacagagggcaattacatcagcaaatcgagagagcgattttgcagggtacagccccttgagagcaggatcaaccatcctgtccagggcatcaatgtcatggagctgaggagtcgcccactgaaccaaggactgctcagctcgtggccttgagctgtcaaaaggtttcctgccagtcatgagtccagcatgaccactccgaaactgtacacatcactcttcatagtatactggcagacatncaa

SEQ ID NO: 489 - DNA, 665 bp, Musa acuminata
  misc_feature (13)..(13): n = any nucleotide
  misc_feature (42)..(42): n = any nucleotide
  misc_feature (658)..(658): n = any nucleotide
gtcaaatttagantagtagagaaaaaaaaaaccatttaactnttaatcaaatccatgaactgaaaacattctataaattaaagatatgataggagaccttcgagcattaggactagaaaggccatattatctagatagatactactgctggagggagaggtccgaagcaaagaaaagcaccactacctaaaaaaaaaatcccctagttgcctcaagaatagaggtgctgtaacactttttaaggagtgccaaacgatgatatggataaactagattagtctacctcctccatcttgctctcttccgcgtcagcttcttcaagtggcggcatatcagtgtcttcggccttctcgtcctcatcgatgctgagaccaagcttcagcatccggtggatcctgttcccaaaggtgttggggtcatcgaggctgaatccggaggtgaggagagcagtctcgaacagcaatagtgtcaggtccttgactgacttgtcattcttgtcagcatcagctcgcttcctcagctcctccatgatagggttctctggattgatctccatggtcttcttgcttgacatatagcccgccatgctggagtccctcagagcttgagccttcatgatcctctccatgttcgcagtccatccatactcaccggtaanccaagca

SEQ ID NO: 490 - DNA, 557 bp, Musa acuminata
tttatagctcagagagaacatggatcatggcttgacggggacgacagatagcgaccaagggaactgccctgggcatggtcacgcctgaagcttcggccatgtcgagttcttcatggccgacagtctcccactcgaagcagtggatcaatgtccccagcgtcggccccatcatcctcagcgcaagcccttctcccgggcacctcctcctccccatgccgaacggaatcatccagccttccttgccgctgccctcgaacctctccggcatgaacttgttgggctcctcccagaccttggggtccctgtgaatggcgtatgcgttgaccaggagcatggtgcgaggggggacgacgacgccgtcgacggtgcactcctcggtggactcatggggcaccagcagcggcgctgcggggtacagacggagcgtctcgttgatgacgccgcggaggtaggggaggttcgggaggtcggattcctccagcatgcggttgtttccgacgcacgcgtcgatctcggcttgggccttccgtagcgtctccgggttggtgagcagcagc

SEQ ID NO: 491 - DNA, 730 bp, Musa acuminata
  misc_feature (14)..(14): n = any nucleotide
  misc_feature (562)..(595): n = any nucleotide
aatcttattcattngcatcgattccctggaagccaaagaaacatacatataaggatgacgccacgcatcgatgcttccttccgtctcttactacgtctcttactacataagaggtggagtaaaatccagcgaggagcaagtactcggcgtcggttcattgcttgtgggagagaatcatctcgcgcagtcggctgcgtccacctgcgctcggaggttgctgggccctgtagtaccccgtcaccgggtccgggacccaagaattcgacgaagcagaggtggaagaggaggcggcggtggtcgaggagtctaccaccttgcgcgccaccgttttctgctccacggaccttctcacaccagccgccgccgctgctgcaacgtatcccctcctgttaaccaagagggcgatgttttgagagacggacgcagcgagagcagcagcactagagagagagcgagccatctgccctcttcgttttatcaccttaatttctctagctagtagaaagaaagagaagagatggacgaacaggaagaggtcgttctcttcttgttgttgtgctcnnnnnnnnnnnnnnnnnnnnnnnnnnnnnnnnnncctccctaccttggcctgtttggtttggggatctgatggcggggcgttacgacagcgatccctttcaggaggaagacgtcaatcccttcgcggattctggggtacgtggaaaagcagctggatcaaattatggag

SEQ ID NO: 492 - DNA, 590 bp, Musa acuminata
  misc_feature (5)..(6): n = any nucleotide
  misc_feature (12)..(12): n = any nucleotide
  misc_feature (18)..(19): n = any nucleotide
  misc_feature (21)..(21): n = any nucleotide
  misc_feature (26)..(26): n = any nucleotide
  misc_feature (539)..(539): n = any nucleotide
acaannacccgncccccnntnattantatatcgattaagcataatgattttatcgaattggcttatttctcgataattgttgcgtgcgtgacaattagtaatcactgcattcctcgagtatagtacagtgtaattaatatacatcatgtgtgtatgtgggacgagctaagcgcagtacagaacagaataccgcttcatcctatggctgcgcctgcttaacagctccatcagcgccattagtcttgtcgccatcatcagctatgaaccgcttccagaaccagtgctgcttccacaccttctccgccatctcctcgatgggcacgttcttggtctcggggaggaagaagaggacgaacaccgacatcaccaccacccacgcggagaagaaggcgaagatgccgtacttgaggtggcacagcatggagaggaaggcctgcgcgatgacgaaggtgaagagaaggttgacgcacaccgtcacgctttgcccggccgaccgtgtttccagcgggaacgtctcgctggggatgagccaccccagnggcccccacgaccaggcgaacgacgacacgaaggtgcacaccccacgcgtc

SEQ ID NO: 493 - DNA, 661 bp, Musa acuminata
  misc_feature (637)..(637): n = any nucleotide
  misc_feature (649)..(649): n = any nucleotide
ctattagttggctctccaatagcaatagggggcaattaatgaacagtgaaggcgatgttgcaaacatagctattgcgtcatcctctagtaaacaagtgtcaacctaggaaataaccatattcccaacaaagactgtcaaatcttggaggataagtagatcaacagtatatcaatttcactgacgaagatatgtggaagcccttagccccctggcacagatcaatccttggacaaattgctgcttccgggtccctttttcgctccatatttctgctttcccatgttgaatggcacatacttgtacttgatcatgtgtacaatttggcgcttcattgtcaggaagaaaagaacaacccagtagcacagtagtataggccaaaaaacaggaacatcaaatacggagaagaaagtcatcacaaaagcaacacagaacgcttttgttatggagtaccagaacttgaactcaggaagacggcgaacgaagggtctgaactcgtcggagccctttgtaggcagggcagggccatcagaaacttcgatctcaggatccaccaacggtgacaggaacccaatcaagagattcaggagatagatcccaagccccgtaggtgacgatataaaaaccctgcacaaagtnaacacgcagcgnatagatcgcgcg

SEQ ID NO: 494 - DNA, 601 bp, Musa acuminata
  misc_feature (4)..(4): n = any nucleotide
  misc_feature (498)..(498): n = any nucleotide
atcnactttaactttgataagatatcagacagcattggccatttaaacaaaccgtaagatgggggaaaatgcaagaaataagttgaagatacaaacaccatagacacaaacacgatatttcggcttatgggaagcccaacactgcaacatgcacacttcgtgcaaagcaacacttctatagcattgaagcaattttacttgcaagcacacgctccctcttctcaatgtatgcgcaagggaaccaacctgcttttcctttgcattcaccttcagcccagccattatctgacaccttacgtacaacgacatagtcaccaacggacaagttaagttccacatctgtctcagcctgatatgaattaataacctcagctaaaaagtactccacagtttcaatagcaccatcaacagctgagttaacaaaaaatccactggcttcttcgtatgatggtggtggaggcataaagttttctgaaactggattaggagaggcttcgnttctttgacgttctaatagcattggaaacaatggtagctttctcatgcacctctggcctcaagttgttcgaggatttgtaggatcttctgatggtaagtgcgc

SEQ ID NO: 495 - DNA, 619 bp, Musa acuminata
  misc_feature (5)..(5): n = any nucleotide
  misc_feature (299)..(321): n = any nucleotide
caaangcttcatgaaaccataatccatatgaaattaagcatccacgagacatacattatttacttttcatacaggaagaaacgggtcgtacaaccgtaatttgttccgtaattcaacaactgcagtcacttaattataatagcatgtactttccagggtgtgtgcgtgtatcacccgctcatgctttggaccggcggcggcaaggttgccgtttctccctgtctctccatgtttgcatgccaacctatgctcatgtcgaagccacgacgcttgagctctcggtacatctggcagagagnnnnnnnnnnnnnnnnnnnnnnntggacgaggcagtcggcgcagggctcctccttcagcccgtactgcctcctcagcttggagcggtagaagcacgagtaaaagcacgggcagaacgtcacgaacgctagaagcgcgtacagtgccccactcaccccacacgaggtggatcctttgtcgatgatctccgcgatttggccaaaggtaatacaagggcagaagcaagtgatgaagcagttgccgacgtcgtcgcagcagtcgcagaggccggtcgaccatggaccggtcaccggagcttggatatggaaaaacgccgggagct

SEQ ID NO: 496 - DNA, 978 bp, Musa acuminata
  misc_feature (13)..(13): n = any nucleotide
  misc_feature (959)..(959): n = any nucleotide
agaagtcacgtcngactcctttgttcattcttccaagaattcttagcagcttcagcagatgaagtgccagactcaccattaccatccttaggcttagagaagaaaggatcccactcatgtggcccaactgttcgctgaccatcctctaacaaagcatacttccagctgttctcttcaatgacatcatccttttcttcgtggccttcaatcatgtcccttcttagtcttgtaactttgtcgatgattgcctgtacagccacatcaaaggcatcattaagagtctccaacttagacctagggtctgcatatatcaggcttggtataaggcttatgactgactctctcattgtttccataacatgtggagggatttgctttaacctttcctcgatactgacactcctctttcgaatatcatcctcaggtataaacactgagtatgttgagtagtttcttgggagatgccatgtatattgtatataagcagagccaggatgaaagaaaacaggtatgcaaccagccaaaatggagtcaaaagctgatctccttgtatatgaatctccctgtggttgtaagcaaaataaagaactctgaaacatctgcattatgctgcttggggagtgacacttgctctctccaaaatcacactccagcaacttacaaactttggaccttttgcactgatctatgatcttccctctgattgattctggattatcagggcgtggtgcacctgcaaatgagaagagaaacttccgctccaacttcctcatccggtcctgccaaatgaagacatcagcatcctttgctgggtgaaagtatgtaggataaggtatcccaaaatcattagcattccatgggctcgcttccacaaccagcatcgacatgtttcttgcagctggcaagaatagaagcttgtttccccaatctgtttcagaatcagtcaatctcctgaaatnccaagtaattctccctgcc

SEQ ID NO: 497 - DNA, 346 bp, Musa acuminata
  misc_feature (8)..(8): n = any nucleotide
  misc_feature (198)..(198): n = any nucleotide
  misc_feature (233)..(233): n = any nucleotide
  misc_feature (238)..(238): n = any nucleotide
  misc_feature (244)..(244): n = any nucleotide
  misc_feature (247)..(249): n = any nucleotide
  misc_feature (255)..(255): n = any nucleotide
  misc_feature (257)..(257): n = any nucleotide
  misc_feature (260)..(260): n = any nucleotide
  misc_feature (263)..(263): n = any nucleotide
  misc_feature (265)..(265): n = any nucleotide
  misc_feature (276)..(276): n = any nucleotide
  misc_feature (279)..(279): n = any nucleotide
  misc_feature (283)..(283): n = any nucleotide
  misc_feature (293)..(293): n = any nucleotide
  misc_feature (299)..(299): n = any nucleotide
  misc_feature (307)..(307): n = any nucleotide
  misc_feature (310)..(310): n = any nucleotide
catctcgngccttgtatgggtagtcctcatcggtgtcgataccaccattgttgatgatgaactcaaaggcataatccatgagccccccgttgcagccctggttgtagtaggtgtcacagtccaccaattcctgctcggacagagagatcaggtcgccagtcatgatctggttgataccttccacacaacatacgagcngaattggtggactgtgacacctactacaaccaggnttaangggggnccnnngtgatnangcnttnanttcatcatcancgntggnggtatcggcnccgatnaggactanccntacaaggcccgcgatggaacttgcgatacttacagg

SEQ ID NO: 498 - DNA, 191 bp, Musa acuminata
caatgcatacagagcatcagcaaaacaatctggtgccagctttttgaaatgcagggaggatgcagttaaggctctcagggttgatgaaccagcgtgcactcacatgaagtgtacgtttgggggcatctggaatggtggaggtggagatgggcagaaaaatctgtgtggcatcttttttctttgatcggcgc

SEQ ID NO: 499 - DNA, 587 bp, Musa acuminata
  misc_feature (351)..(351): n = any nucleotide
atgtatctgttatggtctacaaagaagagaaaaggaagaaagaaatacttttaggggatatttacaatggaaaggatgaattgatttctgcctaccaactctgcttaaggtgtaagtcgattatttagacatctgaaccattatgattattttgttcctcgtaaaaaagttcctaaagctttccacagccggtggtgtctccacttcttcatgcaataaatcctcctcctcgattaccaaaacccagttcagccaatttccgatacttcatgcgagaacttacttgctcggctcctgcagaagagatgtatcattcagagagccccttcaaatgacactccaaggtctgtntgtttgtgtggctctgctgatgcatggacaaggccttgaagcagttttatgacatcgactatatcatcaagatagtacttagccttgctcggcttcttgccaacagtgcaggcaaagacttcagctaatgctggaaccaatgcctcatttgtggaactaatgatgctctcaaacatgtcttcatcagactggtcatcaccaatgcacaatatgaaatccggtggctttccggttct

SEQ ID NO: 500 - DNA, 579 bp, Musa acuminata
tagtcttttgactgtaattccgatgtacataaaaaatgactaacctaggtcaattattttgtgcttgttaccttatttaggtgacagtggaaaataacccagagatgtccttcgcggcctcgtctgctttacagtgttgggaaatgattcgggaaagactgaatcaagagattgttagacagcataatcttggaaagcaaggccttcctgaattacaaagcccagaatccatggatggtcttgaaatgtttgggttcttatctacttcaattattcgagttgttgaagctctcgatccttaccatcagtgtcaagagtactgggaatgtaagttcacttcaccttctttctcgaagaggatggatgtgaaagatctgcctgcagcaattccgacgactttcgacgctaatgttggcacatgtagttcccatcaggataagacaaaattatttggagtaaatttatcaactaagatggaagaggatgcatcatatgacaaccctggtgaatcagtagaagaggtcagaatatactaggagggttcttcaagaaggcagcccaaagaattaaggatgatgc

SEQ ID NO: 501 - DNA, 568 bp, Musa acuminata
  misc_feature (6)..(6): n = any nucleotide
  misc_feature (478)..(478): n = any nucleotide
  misc_feature (528)..(528): n = any nucleotide
  misc_feature (539)..(539): n = any nucleotide
  misc_feature (563)..(563): n = any nucleotide
tatatngaacgtggacaggaaatatttggagagcagacatcctatttatgtatgtgtgtatgttttttgtatgtcatgaaacaaaagcaaaagggagatcagaacatgcagagcttaggaagatatgaagacactacaaagcctcaaaagaattgctgctcgaagaactgtgatggtggaaacaactccgtctctcttcctctcttcctgtcgccaccattaacaggcagcaatcctgatatgtccacaccgaacagcttcacaacccgaagcgggttaacagtaggcggcggggtcatcgtgcgaaagctcgcgatcacgtccgtcctccagtcgatgaacagctgcttctccggcccggtggatcgccagaaggtgaccacgtccccggccttgaggttcttctccctgacaaaccggctccagccttttgtcagcacgaagctctggctactgctccagtacgagtacctaaacntccacaccctgccgccggcgtctcaaagtgagagcacacccttcgatgcnacgtgctgcgntctcaacgggaaatacttctcggngtgtg

SEQ ID NO: 502 - DNA, 553 bp, Musa acuminata
  misc_feature (4)..(4): n = any nucleotide
  misc_feature (36)..(36): n = any nucleotide
  misc_feature (67)..(67): n = any nucleotide
  misc_feature (160)..(160): n = any nucleotide
  misc_feature (188)..(188): n = any nucleotide
acgncacaaacacttgcagcaaagcttttattaccncatcaccgcttgtaagcagtagcaattcggngctcagcaagtgaggttacttccagggtcgacgccgaactggctgcagtagtccttgtagtatccgacgcgagcgttcatcgtctccgtgttnttaccgtcgcactcgaggtcgccgttgntcgccccggatggtggcgccgaatccttggcctgacgtgagggccgagtggcagttgttcatccagaaccacagggcggccttgaaggagacgacgacgtcttggccaccgtctccggcgcgttcaggccgtcgaacccgatgctttgcccggcgggtccgtagttgtagttccaggagagttggagcggcccgcggcgtagtagcccttccccgcaacgcacggccactccgtgttgttctcgtcgcagtagtccttcgacgcgccatcgatctcctctatgtagcagaagtgtcggtctcgtgcgtggctgggcgaagaaggcggcgatctcgcgcttggagtcgtcggcggttccggtgtgg

SEQ ID NO: 503 - DNA, 553 bp, Musa acuminata
  misc_feature (5)..(9): n = any nucleotide
  misc_feature (11)..(11): n = any nucleotide
  misc_feature (14)..(14): n = any nucleotide
  misc_feature (16)..(18): n = any nucleotide
  misc_feature (20)..(20): n = any nucleotide
  misc_feature (28)..(28): n = any nucleotide
  misc_feature (38)..(38): n = any nucleotide
  misc_feature (80)..(80): n = any nucleotide
  misc_feature (232)..(232): n = any nucleotide
  misc_feature (253)..(253): n = any nucleotide
  misc_feature (256)..(256): n = any nucleotide
  misc_feature (281)..(281): n = any nucleotide
  misc_feature (301)..(301): n = any nucleotide
  misc_feature (538)..(538): n = any nucleotide
acttnnnnntnttngnnntngggaaganaagcaaagtnctggagctgcagcgtggaatgaagcaggataagatggggaanaggaggagggggttaaagcagctccaacgatccgattctactcccaggatcgaatccaaacagttgatgcgaagaatccgcatcgttttcgatgatcctgacgccactgattcgagcgattgcgaggggacgaactccccccgcgggaaganggcgattcacgagttcccgtngcntccccctttccctcttcccctggcncaggcctcgtcgcaggagancaccgggcgtaactcaaaagcccttcggaaacccaaggacagatgtctcggctcggtcacctcgtcttcgaccgcttcctccgtcgccaagtttaagggagtcaggcgcatgccgtcggggaaatgggcggccgagatccgcgaccccatccgcggcgcccgccgctggctcggcacctacgacaccgcggacgccgcgccgccgcctacgctgccgccgcttcgtcttcagcttanaaaagggcctctctc

SEQ ID NO: 504 - DNA, 539 bp, Musa acuminata
  misc_feature (23)..(23): n = any nucleotide
  misc_feature (48)..(48): n = any nucleotide
  misc_feature (93)..(93): n = any nucleotide
  misc_feature (154)..(154): n = any nucleotide
  misc_feature (307)..(307): n = any nucleotide
  misc_feature (384)..(384): n = any nucleotide
  misc_feature (497)..(497): n = any nucleotide
  misc_feature (506)..(506): n = any nucleotide
ttcgtggagtaggccaacgggancatcatattgctttcaatgacaggnggggacgtacgaccgtcaaatacagcaaccaaaaaccatgcaggnacaaacatgaagactaattgggtgaagacacgatgacacagtctttgatcactcatcaggncactcgaagtcggatggcacttccttgccgcagtcagcaagaacctcgagtgcaggggaaagaaggatctgtatgttcaaggcctgggccttgatggtggcgcacagacacagggcggcgtcgaggtcggagagcccctccagcaccgggcancactggtaactcacgccctcgccgatgatgatgtgcaccagccccccgagtaggtccacgcacgagtcgagcttagnggtgtcgatggggcatgtcggagtcgtcggtgatggagggtatggagtcggggttggtggcgacggcgttacgtatgctggtggtggagggtttggagctgtgtacgttggtngtggtggtngtgaagggcttggagtagtatacgttggtggcg

SEQ ID NO: 505 - DNA, 531 bp, Musa acuminata
  misc_feature (4)..(4): n = any nucleotide
  misc_feature (6)..(6): n = any nucleotide
  misc_feature (93)..(93): n = any nucleotide
  misc_feature (188)..(188): n = any nucleotide
  misc_feature (341)..(341): n = any nucleotide
  misc_feature (395)..(395): n = any nucleotide
  misc_feature (440)..(440): n = any nucleotide
  misc_feature (483)..(483): n = any nucleotide
tttnanctgcatctccctgttcccctttccctgggtgaacacgttggtgtggagagtgtacggatcgccgctgaggttgcccaggaactcgangtcgatctcgtcgtgcgtcggcccttgcgaggacaaatagtaagccgtgacggtgccggcggagttaccgggcacgagcttgatctgcatgtcgntcttgccaaagaggtactcgttcctggactggaatcccgaaccggtggtcttgtcgagggtaagggtgaggagctggccgccctcgaggatcttcgcgcggccgtcaccccaggtgatgtcgaagtcccggtagaagttgcctgccgtggcgntggccgccaaggagcaagctatcaggaagaaccgtatcaccatgataccaacancggcagtggagcaaaagtagctgaaccaatgcccgaattaacacngtgatagtagcagtagtaggatgtggtgaggagtgaggttgantggtgcgtttatataggatgggaggttgccacagatctatgggttggc

SEQ ID NO: 506 - DNA, 511 bp, Musa acuminata
  misc_feature (279)..(279): n = any nucleotide
cgacaggacacagtctaggacatggatttggctgttcgagcaagcctcaagggatggaaattcatattccttggagacctcaaggttaaaagtgaactaccaagtactctcaaggcctaccgctatcagcaacatcgatggtcctgcggtccagcgaacttgttcaggaaaatggccatggatatcgctaggaacaagaatgtaactctctggacgaaagttcatgtgatctacagcttcttcttcgttcgtaagattgtagctcacatcgtgaccttngtattctactgcgtggtgatccctgcgactgtcttggtccctgaggtggaagtgcccaactggggtttagtctatattccttccaccatcacacttctgaatgctgtcggaacaccgaggtctcttcacttgctggtgttctggatccttttcgagaacgtcatgtccttgcacagaacaaaagcaaccttgattggcctcttggaagcagggagagtgaatgaatgggtgg

SEQ ID NO: 507 - DNA, 499 bp, Musa acuminata
  misc_feature (7)..(7): n = any nucleotide
cgagttntcaacaaattccgcctcggtcgtaaaatcgggagcggctcgttcggggagatctatttaggttctaatgttcagtcaaatgaagaagttgcaatcaagctagaaaatgtcaagacaaagcacccgcagttgctatatgaatcaaagctctacggaatccttcaaggaggaactggtattccaaatgtgcgatggtttggcatcgaaggagattataatgttcttgttatggatttattgggtccaagccttgaagatctatttaacttttgcagtagaaaactctctttgaagtctgtccttatgcttgctgatcaaatgatcaaccgagtagaatatgttcactctaaatcttttctgcatcgagatatcaaaccagataattttttgatgggcttgggcaggcgagcaaatcaggtctacattattgactttggattggccaagaagtacagggacaccacaactcaccagcacattacttacaggagag

SEQ ID NO: 508 - DNA, 453 bp, Musa acuminata
  misc_feature (2)..(2): n = any nucleotide
  misc_feature (430)..(430): n = any nucleotide
  misc_feature (432)..(432): n = any nucleotide
tnccttccccttctctgtcaacctcttctgagaaggttatcactctttccttgtttctggtgtacagggttgtattctgggagctctgatgtgaacattaatggggttttggcaagggtgagagggcccttcaccccatctcagtggctggagctggaacaccaggccttgatttacaagtacatcgttgccaaagttgctatcccacccaatctgctcacccctatcaggagaagcctcagttcttctgggttccatcccttatcggctggaccttttggttcaaattcattgggctggggacctttctatctgggatattctggaaatgctgatccagaacccggtaggtgtcgtcggactgacggaaagaaatggcggtgctcgagggatgcagtcgccgaccagaagtactgtgagcgtcacatgnancggggccgccatcgttcaaga

SEQ ID NO: 509 - DNA, 397 bp, Musa acuminata
  misc_feature (8)..(8): n = any nucleotide
  misc_feature (128)..(128): n = any nucleotide
  misc_feature (272)..(272): n = any nucleotide
tgatacantaataatatcaacaagatatacaaaaagtgctatcaagtcatgtgctgcattgtcctatgttgaagctcaagcaagaatggatgatagccgaatgatggatccattgactaccgacctancgaaatttgaactcattagcaaagattatgaggcttcggcgaattgagagaggagctcttacacttgcttctccagaagtcaaattccaaattgatacagaaactcatgatcctttagacataggtatgtaccaaattcgcganggaaaccaaatgatcgaggagtttatgttggctgctaatgtttcggttgcagaaaaaatcttgagacattttcctttgtgctctttattaaggcgtatcctagtcccaccaaagagatgcttgaa

SEQ ID NO: 510 - DNA, 725 bp, Musa acuminata
  misc_feature (12)..(12): n = any nucleotide
  misc_feature (23)..(23): n = any nucleotide
  misc_feature (29)..(29): n = any nucleotide
  misc_feature (33)..(33): n = any nucleotide
  misc_feature (40)..(40): n = any nucleotide
  misc_feature (42)..(42): n = any nucleotide
  misc_feature (47)..(47): n = any nucleotide
  misc_feature (49)..(50): n = any nucleotide
  misc_feature (58)..(58): n = any nucleotide
  misc_feature (73)..(73): n = any nucleotide
  misc_feature (88)..(88): n = any nucleotide
  misc_feature (99)..(100): n = any nucleotide
  misc_feature (102)..(102): n = any nucleotide
  misc_feature (107)..(109): n = any nucleotide
  misc_feature (116)..(116): n = any nucleotide
  misc_feature (139)..(139): n = any nucleotide
  misc_feature (144)..(144): n = any nucleotide
  misc_feature (178)..(178): n = any nucleotide
ttaataacttgnacccatccagntgagtnaaanatccctncnacttntnntctggcantccaatacaggcganttgaagaagcccatnccccgaaacanncnttttnnntcctctnttgttttcttggctccttattcnaaganaatttccccaagaaaacaaagtctattatacacnactacgaaagcagacgccacacaccaccactttcatttacaaccactggtagtattctatacaatccgttggcttcgtcatccaacagcacacgatgccaacttgactaagtagaacaccaaccttatgcgaaatatatcactctgcttgtgtttcaggcgggggagagacgttcgcgcgcggcttctcctcctgttccccgaataccttggcgatcctctcgatcggcaccgtgggcaggtactgcgccaccgggtagtccctcgccgcggcggcccccaccgccttgttgtacctctccgcccagtacgccgccgtggggactaggatctgcgccacctgcggaaacagtggcaggcggttcaacgaccgccacgcggctaccgcgtaccgctccgccaccggctcgtactgcccgtacatctccttcgccaccggctcgcagcgggcgtagagatccttcgccactcccgacgccgtcgccatcacccccgtccgctggacctcgccgacgagggagcgggcaactccggcgcttttccgccgc

SEQ ID NO: 511 - DNA, 499 bp, Musa acuminata
  misc_feature (445)..(445): n = any nucleotide
gggccatgtatgtagctaagcttttattgaagacttcctccgcaacttctacagtcaactcacggagtcgctatctcagcagtagcgtttattgcgttattacatggattcgtcacagtagtatcggactaagtaaagggactctggttgtagcagtccaagttgtctccgtagctcacccccagcaagtcgcagtacctcttgtagaagccgatcctatccgccaccctggcatcggaccctttcccgcactccaaccctccattgatgatgttggtggtgacaccgtagcccggaagccttccggccgcccggtcggcgttggatggcgtccagctcccggttatcacgtcgtggcacgacggcttgggcgactgaggagtcatccagaaccacagagccgtcttgaaggagatggtcgggtcggtggccaccaggtctgggntgttgagcaggtcggagccgatggctctcccggccggcccgtagttgtagttga

SEQ ID NO: 512 - DNA, 439 bp, Musa acuminata
  misc_feature (4)..(4): n = any nucleotide
  misc_feature (18)..(18): n = any nucleotide
catnaaatatattggtantgaaataaagcatatgggatgtgatcttaccggcattaatgcatcagatcccataagaagggagcaattaaagtagaggaatttatagtcatgaggtcgatgatgaaccatcccgtcgaacgcccaccgctgaagtagtagcactgctagtcccaccggcagcaggcagagccgaagaggaagactcccccccagcttccgaattcttctcgggtactgtagcggcggaagcggatgccgaggcagcggtggccgcagacgggtctcgcttacgcttcttcttctcgtaagggatgccccgggccttcgcctggctctcccgcacctccctgaggtaaatcctgacggggcgggcggcgaaggggttggactcggaccggccgccgctctcctcgtaggccgcgcggaggcggccgatgaa

SEQ ID NO: 513 - DNA, 637 bp, Musa acuminata
  misc_feature (76)..(101): n = any nucleotide
agcttctgtatcactggtagcttacaaccaacctggaggaacacaagctccgctgcctaaaacttcctccccattnnnnnnnnnnnnnnnnnnnnnnnnnnacagatgaacgagctcaccgagctccgataacctgagacgtaaacccccgaggcaccaaaggcatcgtatgcagcaatttgactggcgtgaccggccatgaacgatggacgcactgctgtggcggtgccataatcctccggttgaggcctgctctgtaagtgcgccccgcttcctctggctgcaggaacatcatggttgtgcttgccttcatacgtggtgatcactgaactgggatcttgcgatgccctctccacatgtttccttacggggcagcccatggtagtgcatttgtaataactcctcgggtttggattacccttcaccaccttctgcccatactttctccaacggtacccgtcgtcgaggatatcgacatcgctctgtgtctgcacaaccactctcggctccctcgtaaccctatttccgggagctgataactcttcatggtcaccttctgtcttccatcgttggatctggttcggtttcgtccaaggttcactccccgattgctcctccgagagctcaaatcgatgta

SEQ ID NO: 514 - DNA, 444 bp, Musa acuminata
  misc_feature (223)..(223): n = any nucleotide
tttccttttttctatcgatctgtggatgtcgaatgcggacactaagcttccgtgcaacatatcatcgcaggggagacagaagcccctgatggcacggaacgcccacgtcctcgggagacttcgactaccgctgcagcgtagaaaaccaaggattaatttacagcactaacaaaacgcttaactcgtacgcctatgccatccatccgcacatctctccctctcnctctctggattaacatgagcccttcaaccggtgccggtgacgccgaggtccggcttgtgctcctccttgccggcaccgaacacggggccgcccccaccggcggcgtcctccaccttgtcctgctgcttctcgatcttgatcatgccctcgtcctccttcgaccgcgggtccagccgcgtcttgttcttctccgccggcaccgactcgtacgtcgtcggcgt

SEQ ID NO: 515 - DNA, 622 bp, Musa acuminata
  misc_feature (5)..(5): n = any nucleotide
  misc_feature (592)..(592): n = any nucleotide
ggaangggacggtgcacggtacagaacaccaacgagactcgacttcatatgacgttacatgaaaacttcgaactgctccacggaaaaccatgacagttcgacgacgacgggcagtagtactgacgaccgaagagggggacgtaccacaacaacaatcacagaatcaaaccctagctaccatattattagtactgattaaaacaaaagataatatccttttctttcactcggttcatctataaccttaattgaccatcctgcagttgttcctgatctccccctgggagcccgtgagagggctgatgtcccccatcttgatcatagctgcggcaaaatccgacgcgaacttgctggggctggcgctgtaagtcttcaccagggagtcagtggatccgttgctgaacagctgttgatccgagtgaaggaggcccttgaggttgaccaggttcttgaagtagtcattgtcgaaggtggtcggagtttggaggtccagcggtgccaagttgccgtcgcctgagccggaagtgctgggacagttggactgcctggttgtggcaagggagctatcgatgttggtgtcgttgtagatacnggatctgaaggagatgcatctgggcttggc

SEQ ID NO: 516 - DNA, 591 bp, Musa acuminata
  misc_feature (4)..(4): n = any nucleotide
  misc_feature (6)..(6): n = any nucleotide
  misc_feature (20)..(20): n = any nucleotide
  misc_feature (521)..(521): n = any nucleotide
gttncntatatattatatanttctttattatcaataaatcagaagaggacatcacatatcaaatgtttcagtgggattgtaacaaaggcaatccctcaatcatctttcgtggggtaagaagccatcatgttgataccacagaggccttcgggcttccccgtgttcctcttcatccttatgtaacccctctccccccacctcgggccccacgagttcttcacgatgatgtaatcctgtccctcggatgagccatatcccaccgctgccaccccatgatccagttcacttccgcacggcccatcgaacactcccccactgtagaactggaagctcctgccggaagcttcaatggcgacgcttacaggttggtttgccagcgccttcaacaggctctcctcgctgttctccggcacatcctcgtagccactgatggtgaccatctcgagatcagcctctgctcctcgcaggtgcttcttccatgagataggggtagcatctcggtgtgcagcccaacagtggangcatgaacgagaaggataatcatcagccctccattgcagccgttgttttgggtgtcgaatcgatcaatgc

SEQ ID NO: 517 - DNA, 549 bp, Musa acuminata
  misc_feature (8)..(8): n = any nucleotide
  misc_feature (22)..(22): n = any nucleotide
  misc_feature (28)..(28): n = any nucleotide
gatacaanaaagtctagttganatttangttacagagaagaatctccacaaaagaaggaaaaattccaagaaatatgtgtcaacgatggttgccgtcggctctcagtcgtcgcgccacggggaggaggttatccgggcgtagaggagctcgttccaggtgtccggcaggcccggcaagcaccagtggatgcagtccgcgtaggtggcggcgtcggcctgctgctccgccgtcagcagcttcccctgccggagcgtgtgcacggaggtgtgcgcctccttgcggtactccgacagcgccgtgatcttcacgaacgacaccggcaccttcttcatcctcccgatcacgttctccgccaccgcgaacagccgccagtccgtgccgacgtcgagcgggcgggagaggttcgccaccggctgagtctccaacgcgcacttgatcccgtccgggttgccccagtccgtgctcctgatgtggttgggtgacatgctcatgaagaacaccatggcgcggttgggatcacgttcttctgacccacttcgcccatgttt

SEQ ID NO: 518 - DNA, 609 bp, Musa acuminata
  misc_feature (20)..(20): n = any nucleotide
aaaaataacaacatgaagcntaaatcctacacccaacccttgaaaacaaaatacgaaacaaaatttgccattgtacaagcatcgggaagccatcagtatcaaacaccatgcggtcaacgagacgaatggggccatcacgccggcggaatgtcgtcgaagatccaaagcatctccatgcctgaagagaccggcggattacacgcctccattccattccctgtgaccacctcatcatctgctgctgtcccctcctccgccgccgccgctggagtgccgccctccatgtacgggataccgaagaagttcatgtaggactcgtaggccatcagctcctccgacagcctcctcacctcaccgtctccctcgcagtcattggaagccgccaagacgggagatttttccaccttgggttgaatgaaattgcggacggggttgcaggggacggaattatcggtctcctcgggctccacctcattggggaagttgaccttggccttcttgccgcggatgcgcgggcctcgcggtcgtaggcgcgggcagctcctccgcggtacgaaggtgccgagcagacgcgaacgctttcatggggtacggatttcgtgccattcc

SEQ ID NO: 519 - DNA, 593 bp, Musa acuminata
  misc_feature (293)..(293): n = any nucleotide
  misc_feature (297)..(297): n = any nucleotide
  misc_feature (323)..(323): n = any nucleotide
  misc_feature (330)..(330): n = any nucleotide
  misc_feature (335)..(335): n = any nucleotide
  misc_feature (339)..(339): n = any nucleotide
  misc_feature (352)..(352): n = any nucleotide
  misc_feature (356)..(356): n = any nucleotide
  misc_feature (376)..(376): n = any nucleotide
  misc_feature (396)..(396): n = any nucleotide
  misc_feature (433)..(433): n = any nucleotide
  misc_feature (535)..(535): n = any nucleotide
  misc_feature (573)..(578): n = any nucleotide
  misc_feature (582)..(582): n = any nucleotide
caatgcaatgacaacattgaactatagaattctctgtgacagaatcttcctcaactaggttagtcttagaacacttaagaagcaaaagaagtaaccttacctgccaattgctccccgagccctaatgcagcagcgagtttagccatgtctttcctggaagcatgctccagaacgagcttcttcaggaagccttcttcgaatcgtgatctcagaccaaacgccaccaccatctgcagaaatatttgcgcctctgaaccacccatggttcatccttctcatcctcctttctcctnctancatggcttccttctataatggccttntcgcggntggcnatcntctctctgctagngagncgcccgcccaggctaagctntcgccggcccatctacgccntgacgtgccccgacctggagagcagtcgtgcggtcgntcatggcgcaggtcgtcggccaggatccccggatgggcgcctccgtcattcgcatcttcttccatgactgcttcgtcaacggctgcgacgcgtccgtcctcntggatgacacaccgacgatgaggggcgagaagaacgcnnnnnngggnatggggccaaa

SEQ ID NO: 520 - DNA, 605 bp, Musa acuminata
  misc_feature (361)..(361): n = any nucleotide
ctatgaaacccgtcggagtacacagatgaggctttttacatgcagcaagctattcttacacacacactcacatgccatgaagtgacgcagaagaaacaacagctagccaggcaagcttagccttttactggcttgcaagccattattcttagactagaaagacgcctgcttgctactgctagtgtttgatctgcgccagcatcgagcggacctccttgctgctgggccgctccttgggatcatccaccgtgcagaagatggcgatcctgagcaccagcagcatctgctcctcgtactcgttgcccgccagcttgggatcgatggccgccgtcgggttcgcggagctcatcaccttgcgtancatcgcaccaggctgatctcgtcggtgtcgtggaagaaggggtccgacggcatcttgccgaccaccagcaccgccaggatcaccccgaagctgtagatgtcgcacttggccgtgaatcgcagcgtctgcccgtactccggggatatgtagcccagcgtgccggccaccttggaggcggtgatgtgggtgtgggcgtcggattcttggcagcccgaagtaagcgatctggcttcatgccgtcgtc

SEQ ID NO: 521 - DNA, 1011 bp, Musa acuminata
  misc_feature (23)..(23): n = any nucleotide
  misc_feature (954)..(954): n = any nucleotide
  misc_feature (1006)..(1006): n = any nucleotide
tacacacatcatgcatttgatanttaagcaaaactacaatatatggagtacgtacacgtactggtaaaatgataacaccttatttggcacccacagattgtccttattatgactggggataaaggctttagcattaagcctccaccaactaaataatcgaagtggatacacacgagtacatggctgtcacaacgaagaagaacacgagatcatggctgcaactcaagcgcacaggtagccataggggaccttcttgccgcagtagttgaggaggagggtgagatcgacgtcgacgttgaggctgatgcccaagatgttggccttgatggcggtgcagaggcacaaggcggcttcgaagtcggcgaggccctcgatgaggctgcagcagggtttcttgggcggggtgacgatctggaggttgatgaggccgccgagcacgttggcgcaggcgcccagcttgaccgtgtcgatgggacaggaaggcatgccgggtttgggagtaggtttgggtctgggcgaaggcgggttacatcatggaggcggggacggcgatgtggaagaaggtggaggtgccagaagaatattccggcaacatccatgccggttgctgcctcgagatctaattacatgcacaagtcttcggtgccaccgtctccgctaccattcattccctgccaccagttttgttctcccttatctgaggacctgtacagctttttggtgcacagtggcgagtctatcttcgacatggaagtctccggcgctataagaaaagatgtggatgggggacgacgatgcaatccacatcctaaatggaggagacaacttgggatatctaagtattatccttgcaataatatatgatcccctgataaccttctcatcatcatgtcacttcaatcttttaatcgccggatgacttaactaaccatactcgttgtcatgagtgtgacnccttccctcatattttgactcagacatttaatggtattaagttaactaatantattt

SEQ ID NO: 522 - DNA, 487 bp, Musa acuminata
  misc_feature (7)..(7): n = any nucleotide
  misc_feature (9)..(9): n = any nucleotide
  misc_feature (75)..(75): n = any nucleotide
  misc_feature (86)..(86): n = any nucleotide
  misc_feature (182)..(182): n = any nucleotide
  misc_feature (429)..(429): n = any nucleotide
  misc_feature (462)..(462): n = any nucleotide
  misc_feature (466)..(466): n = any nucleotide
caaatcngnttactttctcgttctacatgcgatcgtgaatccaacgtcatacacattttgacttattgtcacaantccaattaggnatctatacgtaaacacccacccctttctttgacttcttcgacttccttttgggacccaagacgtgtatcagttcaccctcctgcagttcgatctgntctctccgctgcttcccgtcagcgggctgatgttccccatcttcaccatggccgccgcgaagtcggccgcgaaactgcagcgttggtgctgtactgctgcaccagcgcgtcctgcgttccattgttgaagagctcctgatccgagtggaggagaccccgcatggcgatgaggttccggtagtacgcgttgtcgaaggtgttggcggtctggacgtcgagcggggccaggttattgtcgccgccggangaggggcagttccgctggcgctgggaggcgaancggncgtcgacgttggcgtcgttgt

SEQ ID NO: 523 - DNA, 592 bp, Musa acuminata
catttcatttctgaatgcttgcatcaaacgcggcacaaaggaacaaacacttccacaaacaccatagattgattcataatacgatttgctcacatcgagctaccaaacggggttgcgaaccacacccccaaacaccacaaagaagacgtcgaaagcagacatggaaagtaaagagtagtagtaactgcgtcactccatagcaaagtagtaacgatgatttagttagtaatcaggcgaccttgacctcgatggttttgggcttcttgggctccggcggcggcaccttctggacggtgacggtgagcacaccgtcctggcacaccgccgaaatagcgtcgacgtcggcgttatcggggagggagaacttgcgcatgaacttgccgacgcggcgctccatccgcaggtacttgaccccgccgtccttgccatcctccccgtcggggcctcgcttgcgctcgccgctgacgacgaggacgcggccgtcctcgacctggaccttgatctcgccccccttgagtcccggcatgtcacgacgaagacgtaggcgccggggagctcttgacgtcggcggggtggtggcatggcttggcgt

SEQ ID NO: 524 - DNA, 764 bp, Musa acuminata
  misc_feature (543)..(543): n = any nucleotide
  misc_feature (556)..(556): n = any nucleotide
  misc_feature (580)..(580): n = any nucleotide
  misc_feature (619)..(619): n = any nucleotide
  misc_feature (641)..(641): n = any nucleotide
  misc_feature (643)..(643): n = any nucleotide
  misc_feature (701)..(701): n = any nucleotide
  misc_feature (739)..(739): n = any nucleotide
  misc_feature (752)..(752): n = any nucleotide
ttacttcagatttcaactgtctacattgctgacacattatttatttctgtcctcgagcacgaacagaaattgcacgacaccgaacaggaattgcaaccacggatggcagagagagcaacagggggagatactactttctcccactgatgtaccaacatcataatacatgaaatagatagatgggggaagaatcagaaggggatagcggcggcggtcttctgccaggcggggcgggaggagacgtcctgccaccaggcgagcaggtgggggcgggaggtgacgaggctcgccttgggggttttcatgaggtagttggtgtatgggatgtggttcaggtccaccagggtgaactcagcaccggccaggtacttgctctgggccagccgggcctcgtacacgtccagcaccttctccagcttcgtggcctgcgcctccaccaacggtcacgtcggtggcgccgcccagcatcggcttgatcagggcctcgtacaccagcgccgcgatgggcggcccgaactgctgcgactccacctccagccacanatccaccaccgcncgctccgccggggtgccgctgganagcagcaggtccggccccgcctccgcgtacttggtggcnatgtagcggttaatcgcgcgcnantcaaaaaggacaacatctcccgtctccagcacagggatctgaccgaaccgggtttagnggcaagaagtcgggttcttgtgagcaccggtgcggagntcgactatgacgngctcaaactcca

SEQ ID NO: 525 - DNA, 629 bp, Musa acuminata
  misc_feature (625)..(625): n = any nucleotide
atgaatagttatcattaccatgatcaagtgcatggcatttcacaaagagacagtgagtggtgaatgaatgaagccatccttatttgtacatcacatagctatgatgttattagtcaacagagagcaaattgataggagcaacagctcaatcattgtaacgtcgacgacaagggtctgctactccgctggcagcaaatccccacagtcgtattgatggacggcgaagaagatcctagaatggagaaacttgtagtagatgttacgccggaaccactcgaccgacgatcgccacactccggcgtttcctccctgctgcacccacccggaaaggtaggacgcggcgatcagccacgtggcgcgccaccgccgctcccgcacgtaactctccagccccgcggcgagctggccccgggaccgtgccccggcgaggttccgcgcgagcacgatggcgtcctccagcgctgtgcacccgccctgcgcgaggtccggcgtcatcgggtgcatggcgtcgcggcgaccgtcacgcaccccttgtggatccggcccagcaggacgtcccacgggagtcggaagaccagcggtgcccagctcagggtggcgaggtcgacgtggcgcacaccatttngaac

SEQ ID NO: 526 - DNA, 656 bp, Musa acuminata
  misc_feature (18)..(18): n = any nucleotide
  misc_feature (400)..(400): n = any nucleotide
  misc_feature (511)..(511): n = any nucleotide
  misc_feature (515)..(515): n = any nucleotide
  misc_feature (605)..(605): n = any nucleotide
  misc_feature (611)..(611): n = any nucleotide
  misc_feature (630)..(630): n = any nucleotide
  misc_feature (634)..(634): n = any nucleotide
agctcttaatcatataantgaaaacagattgcggtacaaagatgtcaccataacaagcagaatgcttcaacgcttccaaagaaacgttttattccacgcatccgatgtacatcacactcaatcggaggagaacgacgatgaggcagactcggtcaagaaaagatgcaaacgccgttgacttagttcaaccctgcggtaaaagggacggaggtcgatcccagccactgatcgccttcgatgaaggactccaccgtgaacatgctggcttcggcggagtgttgatcaccctgtagcccggccatttcaccctgttggcggtgctcgatcccggcccgcggttcatgtactccccgtagtatagcgtgctcagcgcgaagtcgccgtcccactctagccaccncgccgggttgatcaggctgtccaggagcgactgcatgtacaccgtcctcgagtacgccttccacggcctgccgaggtaggtggagaagttggactgcaccggcgccagcancgangccgccgcgaccttgcagttctgaatcgagatgccggtgttctggttcggatcctcgcggccctgcgccgtgaagacgttcttctggttngataanggcttcgggcgtacaagtngcanttctggagcacgactccggcgt

SEQ ID NO: 527 - DNA, 472 bp, Musa acuminata
taataatcataataggctaatcaaggtttcggagaacagaactccacccgaaaattgtagggaggatctcccactaccaaaaattattgacgtccaagaatttctcgcacggagatgcatgtatactgaaataaaaatcgtcatcatatgagaaaaaatgacgatgcatccttaagcaccacctgaagcaagattgccaccaaaccatttccagtatccatccttgtctttcttaaaattaaacatcctcttgaagtaatccttaaaggcaaagttcagagcctgagtgggaaagtaacgaatgacattggctgtgttccctctccacagagacaaaacaccttcatctttaattgttcgggaaaagcagtctgatattcctttgtaaggctcagagaggcgcccagccttgatcatctcatcctgattttgtatcagaagtttcacacgctcaataggagcagcagctgtc

SEQ ID NO: 528 - DNA, 166 bp, Musa acuminata
  misc_feature (7)..(7): n = any nucleotide
gcggtgncgagagagaaggggttggagctggcggtggtgaacccggtgctggtgctgggcccgctgatgcagccgcaggtgaacgccagcatcgtccacatactcaagtacctcgacgggtcggtgaagcggtacaccaacgcggtgcaggcgtacgtcgatgtgc

SEQ ID NO: 529 - DNA, 623 bp, Musa acuminata
tagtttcagaaaaaggtataagcagacttcatgtaaaactgacgcaacaataatagttcaaaaataagagggcatggcccatgacatacggccaatagcaaccccaacagttcaaatttgacattcaatgaaactaaagcgagaacgagataccattgagacaacatcaaggacggccgaacttaatccacctcctcaatcttgggacctgcaccactggcaccagcagagggtgcgtcatcatccattccaccacccatgtcagcaccggcaccctgatacatcttggcgatgatggggttgcaaatgctctccagctccttcatcttgtcttcgaactcgtcagcttctgccaactgattgccgtcgagccactggattgcctgatcaatggcatcctcgatcttcttcttatcggcagctgcaagcttggatgcaatcttatcatccttgatggtgtttctcatgttgtaagagtagttctccagagcattcttagcctccaccttcttcttgtgctcctcgtcctccgacttgtacttctccgcttcttgcaccatcttctcgatgtcctccttgctgagcctacccttgtcattggtgatggtgatcttgttcttctg

SEQ ID NO: 530 - DNA, 570 bp, Musa acuminata
  misc_feature (5)..(5): n = any nucleotide
  misc_feature (17)..(18): n = any nucleotide
  misc_feature (31)..(31): n = any nucleotide
  misc_feature (548)..(548): n = any nucleotide
  misc_feature (553)..(553): n = any nucleotide
  misc_feature (563)..(563): n = any nucleotide
aacantaccctggattnnatctaagcatcanccatggatctccttctcaagtcacatttattgtcatggcatgcaccatgttcttatcccaagaacacagtgtattattcttggagttattgagtgatcttagtaagggcgctgccccacatagttgcccggaggtttgtagttgcagatgatgaagatggcgccgctgttgcagcgcacacggccgcagccgatggccgtggacgaacgccacacaacctgcgtgtagtggccgcacaccttgttaggggcgcacgtgttgctgttgtagtcgtagtactgcttctcggagacccaggcgttgacggcgtctgccgccgtgtagtcgaggccggagccccagaagatgttctcgccgtacggcccaccggagtgcacgagctggcagtcggccgcccgctggttggcgtagttctgggcgtacgcgcgacggtgttgtcccacgacacgggggcgacgccgacggggcgcgggcggcgttgtgggggctcacgaattcctggggcgagtttgggtangatanccggtgcatncatggca

SEQ ID NO: 531 - DNA, 746 bp, Musa acuminata
tcaatgaaataattatgacccaaaatacttgtaggtccaaattgtgatccgttcaagtttcaagaaacttgtaacatactgataatgagtaaagaggggtgtttgttatatatcatcatgattcaactttctccaagatcagaattctccctttattttggtgctttatttcatgttttattcgtaggtaggtaggtaggtaggagatgattcatcaaccttacaagttagtttctagaagcttatttggtagacgggctgcttgttgggataaaacaggccaaagttctgctcgatccctccagccttctggttctcgttgaacatctcgaatatgtacgcctcgatctccttccctggtctcctcggcgttcctccgccaacatgcctgatcaagttctggttgtacgtctgcgcgttgctggtgctcgcttcggctcctccgcccgccgacggccacccgctctccgacaccaccaccgccacgttcgcccctcccactctctccagcgccgcgaagaccgcgtcgacgatggcgtcgaacaggttctgatagctgaatcgcccatcctgcacgacgacgccggaggcgtgaacagggcgtagggcagcgagatctgtcccgggttgccggtgtagctaaaataagggtacacattgaccaggagcggcgctccgttactcgccaagaactgcacgatggggtcagggtacgcctgggcggcggaggagaaggcgccggcgga

SEQ ID NO: 532 - DNA, 633 bp, Musa acuminata
  misc_feature (606)..(606): n = any nucleotide
  misc_feature (611)..(611): n = any nucleotide
gctgtgatgatattatgcatcttattagttggttgcaccacttctattacatcactcaacagtattagcccaagagaaggctaataccttccatcactcttgacatcttatttgtattgtaggagactagtatatatatctatatgcgtggttgcctgcacgagggcggcttattagtggcgtcagtgatctcaagggcagaagacaaccctgtagttggtgccgccggggcaggtgaaggtgctcgtctgatcgtccttgggatagctgtaggcgtcggggcagtttctcttgaagaaccgggagtagtcggtcgggctgcagctgccggagttgcaacagtactggtccgtcttgaacacggtgcaggggttgttgcagccgcccggcgccttcagcgccccggggcactgcccgttgatgtccgccgcgcaccggatgccgcggcagccgcctgacgtggggctgaagtccattggcacgttgaagccgtcgaccagggagatgtcgaagaagtcgaggttgttgaactggttgagcgcgaactccgccagggtgttgggcgggttgccgtacgccgtgcatgacagcacgccgccgagtagnccgtntgcaccgccggtccgttccgtc

SEQ ID NO: 533 - DNA, 622 bp, Musa acuminata
  misc_feature (533)..(533): n = any nucleotide
tttgcaaagatgatagtaattggttaagtgcatagcaattattcgtcacaggagaacaatctcagcaactaaaccggatgatagaagcggctccgtcgtggaggttcttttgcggtggtgttactgagggtttggaggcctgctgttggctgctgaaaccctggagccccactcgagcaactctttgctggtatcatccttagtgcacgatgatctctatgaagcagaggcaatctttcttcgcccccatcgctgcctcgattgcctccttgagctcctcctcacacgtgacctttgcggtccagcaattgccctcgccgttgtggatggcatccaccagaccagtgtagttccagttcttgatgacattgtaaggcccatcatggatctcgacctcaatcgtgtacccgccattgtttatgaggaagatgatggtgttctggccgcacctcagcatcgtcgacacatcctgggctgtcacctgaaagttccatcgccgatgcaggcgatcacgcgtctagatcgcgggcggncgtctagaggatccaagttacgtacgcgtgatgcgacgtatagtcttctaagtgtactaaattcattcactggcgtcgtttacaagtgt

SEQ ID NO: 534 - DNA, 706 bp, Musa acuminata
aaaagttcaagctcaaacaagataaccgaaagcatcaaataacagtagtgacggtgcaaagataaaacagtcaacaaagcaagaagaaaataattgtcgacggatctcacaactacagataaccaaatagctatgtccgacgaggcgggacgtgcagaaaattacataacactacttatctgccatagaaaggtccagatttttttacatgaaagtcatttatcctcacttggccatcatgactttgacaaactcgtcatagttgatctgaccatcaccatcaacatcagcttcacgaatcatctcatcaacctcctcatcagtcagcttctctccgagattggtcatgacatgacgaagctcagctgctgagatgaacccattctgatccttgtcaaacactcggaaagcctccctaagttcctcctctgagtcggtgtccttcatcttgcgtgccatcagatttaagaactctggaaaatcaatagttccattgccatctgcatcaacctcattgatcatgtcctgtagctctgcctctgtaggattctgtcccagtgatcgcatcacagttccgagctccttggtcgtgatgcaaccgtctccatccttgtcgaagaggctgaaggctccttgaactccgcgatctggtcgtccgtcaactgctccgccatcgttgatccttttgtcccctctagagtagatc

SEQ ID NO: 535 - DNA, 557 bp, Musa acuminata
ctttattctttaaccacgtaatgacttcaaaacaaatgttgaccgaagataacaacacacgggcggttacggagtctcgttgactcgatccattgccccctcacttcttgggcgcaaggcggctcttgatatcctccacctccttggtgccgatctggaaggccttggcgaggacgtcgtcgggcaccgtcggggttgccgcgaagagggtggcagcgatggactgggtgccggggagctggctgttgaagccggcgatgacggcggcgggcactgcgccgttgttcttctggaagtggacgagcccacgggggaagacgaagacttcgcccttggtgatggtcttggctatcagcttgttggcggtggtgatgaagcccacgtcgagggtgccgtctaggacgaagacgatctcggtggcgcgcgggtgggtgtggggcgggttcaacccgccgggggcgtagtcgatgcgggacatggacacgcccagggtgttcagcccgggtatcttctcgacgttggcgccggttacgagggagcccatggtgttgttggtg

SEQ ID NO: 536 - DNA, 596 bp, Musa acuminata
  misc_feature (15)..(15): n = any nucleotide
cgtatgctattagcnggtggaagaagagaaggattagattacaagatgaacgtgaagtgtgacagcatcaaagaccagagcggcttaacccaacggacacatcctatatactgagcacgaacacagtcgcagaactgagccctccgcaccatcaagcagcggcctttctcgccttcttcgccgctggggacctgatcgacttgggctgcttcggcttcggagcagcggccttctttgccttcttcgcggtacctgcataagctttcctcttggtagcctcccttggcttcctcgcttcccgttcaggctgctgcttcttctccatcttcttcgtctcgccattctttccggcctccgacagattgaatgaagcctttaccttcacaagcttcccctttgccgtgaagttcctcagctggaccgccaagaccttcttgtagttctgcggcagactcccttgtgcttctcctccatgaacttggcgatcgcgtaggggctcgatccggtcttgtcgttaagggcaacgatggcctccttgatcatctggaaataaggcgggtgagacggggcgaaggttggaaccgtgcgttcttatc

SEQ ID NO: 537 - DNA, 643 bp, Musa acuminata
gtgaggctacaatcacaaaggacgataaggtttggccaatcacagtgaaagtccacttttccaaacaatgctcaattgtagactcgtagtaaacgactttggatcatcatccaattcatgcccaccgcagacattgattttattcttctcttataggtcgtattatctgcatatgacgtttagtaataaacaacgaaatccatacctcgcattttatcaaacatcttgcagtccctaattatggcagcactggactttgagttgagatctcaacggctcatgccttggaccggtggcggaatggttgcgggttgcccctgcctctccatgtttgcatgccaacctatgctcatgtcgtagccacggcgattgagctctcggtacatctggcagagggagcaggtctcgcagcagcagtggacgaggcagtcggcgcagggctcctcctcagcccgagctgcgcccgcagtttggagcggtagaagcaggagtacaagcactggagcacgtcacatacattataagcgcgtacagcgcccactcgtccgcatgaggtgctcctttgtcgacgatctccgcgatttgaccgaacgtgatacaagggcagaagcaagtgatgcagcagttgtgccatcgtcgcagc

SEQ ID NO: 538 - DNA, 485 bp, Musa acuminata
tcgtcgtcggtgggccacggtcgtggagacgcgattgggcgagggagggtgcagctgaagcggatcgagaacaagatcaaccggcaggtgaccttctccaagcgccgatcggggctgctcaagaaggcccacgagatctccgtcctctgcgacgccgaggttgccctcatcgtcttctccaccaagggcaagctctatgagtactccaccgactccagtatggaaaagattcttgaacgttacgagtattactcctacgcagaaaaggctcttatgtcatccgatcaagattatcagggcaactggtgtcaagaatatggaaaacttaaggctaaggttgaagctttaagtaaaagtcaaaggcatctaatgggagaacaacttgaggccttgaatcttaaagaactccagcaactggagcatcagcttgaaatttctctgaagcatattaggtcaagaaagaaccaagtcatgtttgactccat

SEQ ID NO: 539 - DNA, 499 bp, Musa acuminata
  misc_feature (12)..(12): n = any nucleotide
  misc_feature (86)..(86): n = any nucleotide
tggaggaggagntggagatggggaggggaagggtggagctgaagcggatcgagaacaagatcaaccggcaggtgacctttgcgaangcaggaatggactgctcaagaaggcctacgagctgtcggtgctctgcgacgccgaggttgccctcatcgtcttctccaaccgcgggaagctctacgagttctgcagcagctccagtatgttgaggacactagagaggtaccaaaagtgcaattatggtgcaccagaaacaaatatcatatcaagggagactcagagtagtcagcaagagtatttgaagcttaaggcgcgtgttgatggcttgcagcgatcacaaagaaatctgctgggtgaagatctggggccacttaacatcaaggaacttgagcagcttgagcgccaacttgatgcatcgttaagacaaataagatcaacaaggacacaatacatgcttgaccagcttggagatctccaaagacgggaacaaatgctatgt

SEQ ID NO: 540 - DNA, 911 bp, Triticum aestivum
cgtcatgacaagctcgtccccacggtccagtgcctcaccacgctgcagccaagcccggggagatcgccaggccatctgtcagttcccgccgatactgttccacagcgtggaggagaagctctgccctctcctcgccttcttccagacgctggccatctccgagaagcagctcgccaagctgctcatgatcaacccgcgcctcatcagctacagcatccaggccaagttctcccagacggtcgacttcctcgtcggccttggcatcaacagggaggtcatgatcggcaagatcctgaccaaggagccatacatcatgggatacagcatcgataaaaggctgcgccctactgccgagttcctcaagtccgcagtcgggttgcaggggtcatatctccagagggtcatcatgaatttccctagcatactgtcacgagacgtcgacaagactctgcggcccatttggtgttcctgcagagcgctggattcagcaaggatcagatcatgaaattggtggctggataccctcctgttctcatcaagagtatcaagcattgcttggagccaagggtgaagttcctggttgaagaaatggggcgggacaagggcgaggtggtagattacccccaattctttcaccatggtctcaagaggagcctggagtaccgtcacaagatactcaagcagatgaattcaaggtgcagtctcagtgagatgctcgactgtaatcagaagaagtttgccatgaaatttggtttgatcccagtagcttagggcctggtcttcttgtctcttcagttcccatgtagcatgttttatattcaggtgaatgttttatttttgtaccattggccgtgttgtttcttgaacattttgggcattgagaatccaagcattttgcccttaactagatg

SEQ ID NO: 541 - DNA, 443 bp, Triticum aestivum
  misc_feature (12)..(12): n = any nucleotide
  misc_feature (16)..(16): n = any nucleotide
  misc_feature (20)..(20): n = any nucleotide
  misc_feature (27)..(27): n = any nucleotide
  misc_feature (51)..(51): n = any nucleotide
  misc_feature (72)..(72): n = any nucleotide
tccgtggtgganctgnacanccactgnaccagcgtgtacggagggaagccnacgcgcggtcggccatggtgntgatgctgcaggcgctccaccacgccaagagcggcgtggacgtggtgtccgggacccgcgtgcgcacgcacttcgccaggccctgctggcgcgacgtcttcaagcgcgtcgcctgcgaccaccaggggcagcgcgtcggggtcttctactgcggcgaccagaagctcacgccggagctcaggcggctgtcccaggacttctcgcaccggaccaccaccaagttcgtcttccacaaggagaacttctgacctgaatttcgacatgcatgttaattaggctatatatatacatgaacgtagaacatatacactttattcgcttgctgtttgctagtagtatcagacacgtacggtctagcattgggtatcacg

SEQ ID NO: 542 - DNA, 883 bp, Triticum aestivum
cccgatcgaagggatggccggcaccgttgaggacagcgggaacacggcgccgtcgtcgccggccgggctccgcggcgccgacctggccctgagggtgcttctgttcgccgtctcgttgtcggggctcgtcgtgctggtcaccgccaagcagacggagatggtgcccctggtcctgacgccgccgttcagattcgggccggtgcccgcccagttcaaagactcgccagcgctcatttatcttcttgtggcgctgtgcatgacgagcttgtatagccttctgacggccgccacctcggtcaagtccatgtcaagttcggcttcctgtgccaaggggatcttcgtcctcattctgcttgatgtggtttacgcgggcatcatggcgtcggcgacgggcacggcgggggccgtggcctgggtggggctgaagggcaactcgcacacgcggtggaacaagatctgcaacatctacggcaagttctgccggcacatcggcagcgccacctgcctcggcctcatcgcctccatcatcctcgtcctcctcgtcgtcctcaacgcctactccctctaccggagaagccgctgatcgaactaggcgtccagccccgctccctcctccggctggcgggacaaatttcatgtgccgtgcatgtcatccgtcggctttggtgagctctgccggccggcggtcagttgtataaaagatgctacgtgttcctgtggctgtggagtgctctacgacatgcgtgtgtgcgtgcgtgtacatgtgcgttgacgtttatccttgtttgtttctacaacacgttgctttgtgacagtaagcacgacttttatcggccaaaatcactgttgtaacctttgtggcatagtttaacatgatttaatt

SEQ ID NO: 543 - DNA, 981 bp, Triticum aestivum
gcggcggggacgtcgggatcgagccagccgggtgctccaggaaggtggtctcttcacggcaagacggctctcgtcaccgtgcggcacccgcgggatcgggcgtgcggtggtggaggaacttgcggcgctgtgtgtggctggcctgtgcacacctgctccctgtgaaggaggctggagctggtgcgagcgcctcaatggagtgtggaggccagtgggcttcctgcgtcacaacctccgtctgcgacctctccgtccgggagcagcgggagcgcctgatttgctgacgtcgccgaacgcttcggcggcaagctcaacatcctcgtaaacaatgtggggacaaacataaggaaaccaactactgaatattccgctgaagattactctttttgatggccactaatcttgaatctgcatatcatctttgccaacttgcacatcctcttctaaaagcatctggtttgggcagcattgttttcatatcatctgtctgtggattagtagccgtatttagcggtactctatatgccatgactaaaggtgccatcaaccagttaaccaagaacctagcatgtgaatgggcaaaagatggcataagaacaaactctgttgctccatggtacataacgacttcgcttacagaaggacttttggctaacaaggaatttgaggcctccgttgtgagtcgaactccactggggcgtgtcggagaaccaggagaggtatcatcgctggttgcttttctttgcatgcctggttccacttacataacaggccagacgatctcagtggacggaggtatgactgtcaatgggctctatccagcttgaagactaccaaggaagaggccatatttcgctctgttgcccaggagcccagtcatatcttgtgttcttggcaaccaaaataaatattcctgtaaaaccgaggtcatcttgaatctagactccacgagtattcgccattgttcagatcagccatgtg

SEQ ID NO: 544 - DNA, 619 bp, Triticum aestivum
taagagagactagtccaggagtctgacatttctcagctaaactatctcaaatcatgtatccgggaggccttccgcatgcatccataccatccttttaacccaccacatgttgccatggcggacaccacggtggcaggctacaccatacctaagggtagccatgtcatattaagccggtttggacttggtcgcaaccccaaggtctgggtcgaaccactggagtttcggccagagaggcatctcaatgcggcaaatgtacttctcactgaaccaggcctacgtttcatttcatttagcactgggaggaggggttgtccagggatctcacttggtacctcggtaacaatgatgttgattgcaaggatgctgcagggattcacttggacgaagcctcctggcgttcacagtatcgatctccaggagagcaaaattggccttgctctagctgaaccccttgttttgcgagccaaaccacgtctgcctgcacatctctatgggccaatagaatgtatgtaatacattttttggcagggtaatgtatgtaatatgttttttcaatatccgtaatccgtacctggatgaatcttacatgctgtatgtcgtgtaatgtggtgtgcaa

SEQ ID NO: 545 - DNA, 599 bp, Triticum aestivum
cggggatctcctgaatctggtatgggagcactggacccggggaaacgtcgtcgagttgatggatccatccctgagcaaccatcctcccgtcgaccaggtgctcaagtgcatccacgtcgggctcctgtgcgtgcagaggaaaccggcgagcaggccgacgatgtcgtcggtgaatatcatgttcagcagccacaccgtccgtctcccttctctgtccaggccggcattctgcatccaggaggtcagtgtcagtgaaacctcgactgcctattcagaagcatatccgctcacggaaaattcaactgtgatgtcttcgaatcaagtgtccatcacggagctttcgccaagatgagtcctgaagcaaccgtgtatagttttcttacgggatagtatcttaatgatcttggaggaggaagaggccctgctgtagtgctgtatcggtgtctattactgaacctttgcactgtggatgtaagtagaactgctaagatgctattaatagtgattgcaactggcaagagtgggcaacagaagtcatggtaaagctcacgtatagcgtgatagattataaagaatgccatttttgctgttcaactaaa

SEQ ID NO: 546 - DNA, 1108 bp, Triticum aestivum
cggaagtattcctcggttttcccctttggctgcctgcctagccgaaaccgacgacgacgctaccactctccttcctccccttccttcaccgcgtctcctcccagaccaaatcccacccggaatcaacttctccccctccgatcctcttcctcccccttccctgccgcctccgccggcgagaatcgccgtcgcgcccgtcgctacgacctaggagccctccttcacgggcggacctcttcccggagccaccggagggcggggacggccggccagtctcgtcttgagccggtatgcagagccagatcgtgtgtcaccgttgccggagggtgctggcctacccttcaggggcgcccagcgtgtgctgcgccatgtgccgggccatcaccgccgtgccacccccggcgccagcagtggaaatggctcagcttatatgtggtggttgccgaactttgctgatgtacacccgtaatgcagacaccgtgagatgctcgtgttgcagtactgtcaatcttgtcagaccagtcaataatatagcccacgtgaactgtggtcggtgccgaacaactttgatgtatccacatggagcaccttctgtcaaatgtgccatctgcgattatatcacaaatatcacaaatactggaataaataccatgccacccgcgccatgtccaaggcctacatcaaatgaatctgcatataatgcctcatcagcttctgttcccacacctcaaccccagaatgtaaccgtcgttgttgagaaccctatgacagttgacgaaaagggtaaactggtcagcaacgtcgtagttggaattacacctgggaaaaattgaagggttgtttctcacctgatgtatacctgttttgtgttctatataagaacctggaaagaccatgtactggtatttccagcctttggtgattggttgctgcctgacctggaagaacaaagacacataaagtgtttttttttggaatttcaccaaggaaagcttgcatgtcgaaagctgtattctggatatgttgattcttttgtctgtatatgagttctatcagacttcactctgggcatgacaaacggtattatacatattttgaaactttacat

SEQ ID NO: 547 - DNA, 482 bp, Triticum aestivum
gatctcttggtcatcgaacggcagcccacggtctcccgctccagcgccgaggcagagtatcgcgccgtggctaatccgtggctgagtgctcttggctccgtcagctgctccaggagttgctttgtgatgttcataaagctactcttgtctactgtgataacgtcagcgcggtctacctttccgccaacccggtgcaccatcgccgtacgaagcatattgagctcgataattacttcgtgcgcgagcaggttgcccttggccgtgttcgggttcttcacgtgccgacgtcgcaacagtttgctgatgtgatgactaagggattgcctacttccgtcttcgaggagtttcggtccagtctctgtgtctctggcgacgcttcgactgcggggggtgttgagttgtattttgtgttgcatgtattagatgttgtggcccacctcctatttgtgtatagttgaggttgaggcctacccctgtactta

SEQ ID NO: 548 - DNA, 342 bp, Triticum aestivum
gccacgccggacgcgttcgacaacagctactaccacaacctgctgcgcaaccgcggcctgctccggtccgaccaggtgatgctctccgcgccggacggcgccgcggcctccacggcgcccatcgtcgagcggttcgccgccagccaggccgacgtcttccggacttcgccacggcgatgatcaagatgggcaacatcgccccgctgaccggaagcatgggggaggtcaggaggaactgcagggtggtgaacagaagcggatcgcgccggtgctgtttgttgatcaaaggagtcattcatttgatttattgattatcttttgaaggaagtcaatttgagacga

SEQ ID NO: 549 - DNA, 738 bp, Triticum aestivum
tcttcggtgtcggtggtgtgggagtccaccggagtgcgggcatcttcctcagcatcgctcatgtcaccgtggtcggccaatccatgatatgcctcgccggaagcgaatgaaatctctgaagttgtcttccgttggaaggtagtggccactgtatggccatattgcctgaagaaatggagcaccgtcagaattccatcttttaccaccaatcgtccagcacatgttatggctccaccagctaggaaactggaatgctgaaacgatcctttcttcttctgcacatcgtcaaggccagagccgaagaaaacgtcagaaccaatgcagcgaattgtatctttgactaggaattgcgtacatacgcgaagcggtgtgtagagaaaaagaacatttacgtggccaacatagaatgcctttgtggtgctgaggacaaaaatccacttggagtcatccgaagtgtgcacaagaaccccggtttgtttgaacataagtttgccaccctcaataacaacttcatagtgttgcctctcttgctgttgttgaaaagatgaaaaaagaggatcagatgatgttctcaattattcaacacttaatgttacttttctgatgtgttaggttgatgtacatactggtccaaggtacttgacgcactgcccttgaagtttactcctagggcaattctcaagatttatttctttgccctccccaatgtctaacctgtagattatgttcaacagttag

SEQ ID NO: 550 - DNA, 611 bp, Triticum aestivum
ggtctgtgagtttctcagaggtggatccaactagattggcaagtgggagtgacgattgttgcgtgaaagtttggaatattaaccagaaaaatagcgtggacacaatcagaaatgtggccaacgtatgctgtgtacagttctcgccgtactcctctcgtatgttagcctttggctcagctgattacaagacatactgttatgatctgaggcatacaaggatcccctggtgtaccatttctggacatgggaaagctgtcagctatgtaagattcttggatgcagaaacgcttatatctgcgtcaactgacaataccttgaagatatgggatctcaaccggactaatcctaatggattatctactaatgcttgcagtctgacattgagtggtcataccaacgagaagaattttgtaggcttatccgttcacgatggatacataacgtgcggttctgaaaacaatgaagtatattcttactataaaagctttcccatgccaataacttcccataagtttggttccattgacccaataaccggaccagagacgaatgatgataatcagcagtttgtgtcgagcgtttgctggagagggaggccaatatggtggtac

SEQ ID NO: 551 - DNA, 547 bp, Triticum aestivum
gtcgacagggaaatcataaggtttgaaatggagaagctttcattgaagaatgatactgacaaagcctccaaagaacgactaagcaagcttgaagctgaactagaatccctcaagcagaagcagaaaaacctttcagaacactgggagtatgagaaatcgttgatgactcgtataaaatcaattaaggaagagattgacagagttaacctggagattgaagccgctgagagagaatataatttgaaccgtgctgctgaactcaaatattcaacgcttttgacactacaaaaacagctggatgaggctgaggaaaaccttactgaattccagcagtcaggaaagtcgatgcttcgagaagaggtgactgatgttgatattgctgagatagttagcaagtggactggtattccagtgtcaaatcttcaacaatcggatagggaaaagctactgctactggaggatgtactccacaagagggttattggccaagatattgcagtcaagtcagtagccaatgcaatccgtcgttctagggcaggcctatcgg

SEQ ID NO: 552 - DNA, 532 bp, Triticum aestivum
tcagcatgcgccgcgtcaaggccgcctggggcgcgggccaggagcaggtggacaagctcatggccgccctcgccccagacgagccggtggcgctcggcgagcacatcttcgccttcaccgacggcatcatcggcaccgtggcgctcgggaacgtctacggcgcggacatgctggcgcgcaagaagcacttccagcacgtgctcgacgaggccatggacatgctcgccaccttctccgccgaggacttcttccccaacgccgccggccgcctcgtcgaccgcctcaccggcctcgtcgcgcgccgtgaccggctcttcagcagcctcgacgacttcttcgagacggtcatcgagcagcacctggaccccgcgaggcccaagccggagaacggcggcgacctcgtcgacgtcctcatcgacctctggaagcaggagcaccgtggcttcaccaaggaccacgtcaaggccatcatcatggacactttcgtgggtggcatcgacacgagctcggtgacgatcctgtgggccatgtc

SEQ ID NO: 553 - DNA, 1099 bp, Triticum aestivum
tgttcctgccgccgatgccgggctgagcgcctaactggctgctcatccagtactgccctcatcgggatcgccgaggtgttctgcctcgtgggcctcatcgagttcctctaccaggaggcgcccgacgccatgcgcagcgtgggggtcggcgtacgcggccgtcgccggcgggatgggctgcttcatggccacggcgctcaacaacgccgtcgacgcgcccaccggcgacatccggagcgggaggccgtcgtgggtggcgcagaacatcaacgtggggaggttcgactacctctactggctgctggccatgctcagcacggtcaacttcgccgtcttcctctacttcgccagcatttacaagtacagaacgccgccgccgaccaccgccggcggcaacagcagcaaggtggaggtctcggtggtgtccgaccacaagtgaatgaatgaaatactacttgaacagaacctagttttttcgcaaccaaatttcaattggattaaattgtggactaatttcaacgcggaagcaatttgatcatcattttcaaatgacggagcacagcgccgcagcagcccacgctagtgaaaaatcattataacgccgttcggtttagagccaacacaagttatctctgctagaactacttgcaactatatacagttaagataaagatctcaccaatcaatcaaaaagatgctacagatcttgacaattgatctagaattaattaaccgctcttgattgaaatccgatatcacctcaactttgatttgtcttctcaaagatgaatattcgcagccaaaactcaacggtgaacccaaagagaccactgaatgacacaagaagaatcatcttcaaactgctgaccgttcagtgttcattcctcagttgcttcaaccttgctgcaacctgcctcattgacagccgaacggctagtgactctgaggtgcacgatatagcgatctttagcatctcagtcaatctgtcctttggcgatgtatcccatagtcccggagagaagaattcactggtgcgctcttcctgcatcagcatccttccccatgatacgatcattaaaccatcgcgcaactgtgagaa

SEQ ID NO: 554 - DNA, 619 bp, Triticum aestivum
tgacgtgctggtgcgccttgcatcacgtttggcaagtggcggagatcgtggacaggggctcgacgtcgtgcggcaccagcggggcgctctacgcgctgctggggtcgctcacggggtgccactggatctactcctgcacgtaccaggtcccaagatgcgcgcccagtacgcgctcccggacgagccctgctgcgactgctgcgtccacttctgctgcgagccctgcgcgctcgtccaggagtacaaggagctcaaggcccgcggctacgaccccgagatcggctggcacctcaaccaagagcgccgcaacggcgggcgccggcggcgtcaacccgcccggcatgcaggagatgggccgctgatcgaacccggctgctcattgccgtacgtgtgaagggagggtcgatcgagcaagcgttctttcgtgcttggtaaattgttgcatagacttggttaagttcgtactctttgtcaataaaatcaccctttgtcgaaaaaaaattcatactgtgaatgggttatgtacttatgttgtatggtgagttgatgatgtgaatgtcagggcaagaacgtgtgtacgtttttctccttcttttttcttttagcgaatggcagaata

SEQ ID NO: 555 - DNA, 446 bp, Triticum aestivum
tctgtataagcaccattcaaaaaaggcgtagtatctgccgaatcacctcactaatcttccagctgcagctcccacacgttctgtccaagcgatcgatcgtccgcagcctgtccaaccggctccttctagctcgatcgaggcacgccatgccatggaagccgcacggatcgcgtcctttctgctcctcctcggggtcgttggtcacgcgcacagcccggcgccgaggcggccggcacgacggtcttcacgctgcgcaacaactgcaccttcacgatctggccggccacatgtccggcaacagcgttcgccgtcgggggcggcggcttcgagctcgcgcccgggccaacgtgtcgtccccggcccgacgggctggtccggccggctctgggcgcgcaccggctgcgtcgccgcggaaaccggcgcgtccctcgcctgcgccacgggcg

SEQ ID NO: 556 - DNA, 393 bp, Triticum aestivum
  misc_feature (381)..(381): n = any nucleotide
gaggtggtgcttcagcgcactgtgactaatgttgggccggcagaagcaacatatcatttagtggttgaagctccagcggggatagatgtgttcgtggagccatctgtgattaatttcacccaaagcagtagtaaaagcgcgaagtttatggtgagattcacagcaaggcagagagtacaaggtgggtacactttcgggagcttgacatggtcagatggaggtactcactcggtgagaattcctattgcggtgcggactgtgatacaagactttgttgcagatacatcttaaactcataactagttgttgtacaccttatttatgtatccgtgtagttggcataaaaacatctgattatgtttacttcatcgtaggaaatgnatagtggagacg

SEQ ID NO: 557 - DNA, 613 bp, Triticum aestivum
tactcatttcacttctcctattcgcagatacgcagatgttgtggtgcataggttgctagctgctgctctagatattgcgaaacttccaccagtcttccaggatggtccacaactcacaggcatcgccgacaacttgaattataggcaccgaaatgcccaaatggcaagcagagcatcggttgagctccacactctcatatatttcaggacaaggcccgtggatactgaagctagaatagtaaagatcaaggcaaatggtttcatagtcttcgtcccaaagtttggcatagaagggcccatctatcttacggcgaagggagacaaaggggctgactgggtagtagacgaggttcaccagaaagtaaccaagcctggaacaaacataagctatgctgtgttgcagagtgttatgatccatatggaagtggtggagcctcagccccaccgccccaagctgcagctcaccctcatatgaacaacaaatgtatgattgaattgtaacattagtgcattcaccctttttccgctacaacagtgtactaggtccattctttaattcaacaaacattggtgatcttatgatattgtcaaatcagcctggaattgctcctca

SEQ ID NO: 558 - DNA, 239 bp, Triticum aestivum
gcgagtccaccaacaccaagttctgctactacaacaactacaacctgtcgcagccgcgccacttctgcaagagctgccgccggtactggaccaagggcggcgtcctccgcaacgtccccgtcggcggcggctgccgcaaggccaagcgcactcctcgtcggcgtccgcacgtcgacgccgcggcacggacgcaagaccagcgggcgcgtccggtcgtctcctcccgtccaaagggcagg

SEQ ID NO: 559 - DNA, 238 bp, Triticum aestivum
cagacccggggtcgaccacgcgtccgctcaacaatgccaccagatagcacgttcagtcacgatgttttttccttgcaaccccactctggcccaacaagttaacacaatgtggaaaagggttacactgtatgccaccaaaaccagtcgttgtcaaatattcatcagcagggatccagtcttcagtcaagctttactgcagccaaggacagtgccgacgaaacaatcgttaaaccgaaga

SEQ ID NO: 560 - DNA, 238 bp, Triticum aestivum
gccgcggcccaccgacgtgcttctcgcgagcttccccaagaccggtaccacctggctcaaggcgctcgcgttctccgcgctcaaccgtgccgcccatccgccgtccgtcggagccgaccactcgctccaccgcaacagcccccatgacctcgtccgcttcctcgagctcgccgaccaagacgacgatggtctgatctacgaggagatcctttctcccggctgatcgcacctagggccc

SEQ ID NO: 561 - DNA, 237 bp, Triticum aestivum
gcggatggcagtgcgcacgtggccaagcacttcccgacggcgatcgtgagctgtcggtgccgcgacaaggtgtttgagttcgtgaagctggcggagctctactacgccggcagccacggcatggacatcaagggcccagccagatcctcgaagtccaaggccacaggagttctcttccagccagcaggtggttcgttcccgatgtaggagagttcattcagggctgatgggggggcg

SEQ ID NO: 562 - DNA, 234 bp, Triticum aestivum
gcgagaacgaggggatcgagggcgtgcggttcgtggtgacaggcgggcagggcttcgtcggcgccgccctctgcctggagctgatccgccgcggcgccctggaggtccgctccctcgacctgcgcgcctcctcctcctggtcccagcagctcctcgacgccggcgtccgcttcttccaaggggatgttcggaagaaggaggatgtggggaaggttttccgcaatgtggactgtg

SEQ ID NO: 563 - DNA, 230 bp, Triticum aestivum
aagcgagagcaaccacagcggcgtgccggaagaaggagcggagggccttgttgcggaggcacggggggcttgggtcctgtaccagggctgctggctgagacccccggccgcgcagagcgtcatgatcgtgcaagagcacttcgaggctcgtcccgacgacaccttcctcctcaccttccccaagtgcggcaccacctggctcaaggcccttgccttcacagtgacgaact

SEQ ID NO: 564 - DNA, 545 bp, Triticum aestivum
cgagctgaattgcgcgaccagacgcctgtcagagttggggccacagccagggctaagagctttgggagcaggaaaatccgaagagatcttgcaagcggttagggatcttcttcgtgaaaagaggttcatttaagaaccagccggaattgggtcacagttcttgatggaactcaggaaggtgcatatgaatgggtcaccattaattatctgttgggaaatctgggaaagacgtacgcagacacagttggtgtggttgaccttggcggtggatctgtccaaatggcgtatgctatcccagagaaggatgctgaaaaggctcctaaaccagcagatggtgaagaatcatacgtgaagaagcttttccttaaagggacaacatatcatctttatgtccacagttatttgcgctacggattgctggctgctagagcagagatcttaaaagctggcaatgccaatggttacagcaactgtgtattggctggacatcaggggcaatacaagtatggtggcaatacatttgaagcatcggctgcaccttctgg

SEQ ID NO: 565 - DNA, 923 bp, Triticum aestivum
cgtgaggagcaggatcctggccacggtgagcaggagggacgccttcctccaccggctcatcgacgccgagcggcggaggatggaggagggcggcgacgatggcgagaagaagagcatgatcgccgtgctcctcactctgcagaagacagagccggagctgtacaccgatcagatgatcatcgctctgtgcgcgaatatgtttgtggccggaacggagaccacctcaagcacgatcgaatgggcgatgtcgctcctgctgaaccacccggcggcgctgaagaaggcgcaggccgagatggacgcgtccattgggacctcccgcatggtcaccgccgacgacgtgccccgcctcagctacctccagtgcatcatcaacgagacgctacgcctgtacccggcggcgccgctgctgctgccgcacgagtcctccgccgactgcaaggtcggcggctacgacgtgccgagcggcaccatgctgatcgtgaacgcgtacgccatccacagggacccggccgtgtgggaggacccgacggcgttccggccggagcggttcgaggacggcaagggcgacgggctgctgctgatgccgttcgggatggggcggcggaggtgccccggcgagacgctggcgctgcagacggtcggggtggttctggggacgctggtgcagtgcttcgactgggaacgggtggacggcttggaggtggacatgacggagggggtggggatcaccatgcccaagtccgtggctttggaggccgtgtgtaggccgcgcgcggccatgcgtgatgtccttcaaaagctctgaggatcgaacttcttggcatcccatatgtacagtagtttccagtagcatcgtgccgtatgcatggctcgataccgttttgatgtaccgaataaacttgttgcgattcggaccataa

SEQ ID NO: 566 - DNA, 776 bp, Triticum aestivum
acgccggaatcttctcatggccgacgagaaagaagccgactcgctgcagccgccgtccaagcagccccgcctctcctccgccgactcgaacgccggtgcggtgacgatggcggtctcgtcgccgctgggtcttggcctcggcctgggactcggcggcgatagccgcggcgagcagcaggccttccaagcacgggcagccgcggcggcggcgaaatcggcgctgacgttcatgcagcagcaggagctggagcaccaggtgctcatctaccgctacttcgcggcgggggcgcccgtgccggtgcacctcgtgctgcccatctggaagagcatcgccgcctcctccttcggcccgcaccgcttcccctccctgattgggcttgggagcctgtgcttcgactaccggagcagcatggagccggagcccgggaggtgccgccgcacggacggcaagaagtggcggtgctcccgcgacgtgctgcaggggcacaagtactgcgagcggcacgtccaccggggccgcggccgttcaagaaagcctgtggaaggagcccccgcagccccggcgcacagcggcagcagcaccaccgccccgccccgcgccatcggcttctcccccgccggcatcctccacgccacccacagcgccgccgcgcgcgccacctgaggccgacggcctcgtcccatccccaccgcgtccgtccgtccgtcatggcgcgtcggcgtggggcaaattcgtgcagatacgaatccgactgtgattttgtcgcgatcgtgta

SEQ ID NO: 567 - DNA, 664 bp, Triticum aestivum
atgaaatccgcggagcatgcagtagctgataggtccattctttgccttgaagatctctcctcgagcagccattgcgccgtatgtgcaagttagctgtgagctattagacatggtaatctctacctttgagatactctttcgtgacatacggatccttaactacgggagcgacagcagcagcatctgcagaaattgcatatgccatttgcacagacccacctccaaggtcaatcacacctaccgtcttggcgtactctcctcccagtttacccaacagatagttcagagcaacccataggtaagatccttcctgagacccctcaagaacattgatccaactaggattatactgaaatttgctcttcgtgtggacaacagccctaactgcttcaagaatttgctccgcctgctcgtctcctatgagtcgtagtccagccgtcgccttggcgaacacctcgatgtcgtcgccgacttcgactagctccatcctcttgtcgaaccggaagacgtgacgcgcgtgcccgtgctgccggcatccatgatcacggcatacttccccggtgtggctggtgcgtccacggtggcgccagccttccggccgagcacggcgtcagcagacgcagaggaagaggccaatagtaacgagcgaggaggagaacagtga

SEQ ID NO: 568 - DNA, 670 bp, Triticum aestivum
acccagaggtgatgcggaaggcgagggctgagatagacgccaaagtcggcatcggccgactggttgaggagtcggacatcaccaacctaccttacctgcagtgcgttgtcaaggagactcttcggctgtgccccgtcggcccaatcattcctgcgcacgaggccatggaggactgcaaggtgggtggctttcatatccagcgcggcacgatgatcctcgtgaacgcatgggcgatccaccgggacgtcaaaatctgggatgcgccagaggagttcaggccggagcggttcttggacagagacacggtcaccacgcccatgctgccgttcgggcttggccggaggcgatgccccggggaggcgctggcgatgcgccttgtcagcttgactgtggcagcactcgtgcagtgctttgaatgggatgttggtgaaggcgacaccatcgacatggccgaaggtggcgggctgacaatgccaatggcgacgccgttggcgactgcctgccggccccgggagtttgtcaagagcgtgctctctgcttccacttgatggattgcggtctgaagaaatagaagaagctaaaattgtttagcaatggtgcactgttgccagtgattcctttagatgatatccgaacattacaagtccattggatgatattgaacattaca

SEQ ID NO: 569 - DNA, 520 bp, Triticum aestivum
cccggcttacgccgcggactacaccgtcggcgactcgtcgggctgggcagcggcgtggactacagcacctgggcaagcgacaaaaccttcaccgtcggtgacacactcgtgttccagtacggcgcgtcgcacaacgtggcggaggtggggtcgtcggactacagcgcctgctctgccaccaactccatccagtcgttcagcgaccaggacaccaagatcacgctcaccaagcccggcacgcgctacttcatctgcggcgtcagcggccactgctccggcggcatgaagctcgccgtcaaggtcgcccccgcggccaccaccacgcccaccccgtccacctcgccagacacgccttcggagacgccctccacgccttcggagacgccctccacgtccacgaccccggccggggcgacaacggcgccttcctcctccaaatcagcggacagcgtcggcggggccagcggcgtccgaggcccgctccgtgatgggcatctctggttggagctgcaggccttgt

SEQ ID NO: 570 - DNA, 468 bp, Triticum aestivum
cgtggacggcgcagctgggggtgctggcgcacggcgccgtggggtgcttcgtgacgcactgcgggtggaactcgacgacggaggcgctgagcgccggggtgccgatggtggcggtgccgcactggtcggaccagccgacgaacgccaagtacatcgaggacgtgtggcgcgtcggcgtgcgcgcgcggccggacgcgggcggggtggtgaggcgggaggaggtggagcggtgcgtgagggaggtgatggggagcgaggagtaccggacgagggcggcgtcgtggagtgagaagacgaaggcggccatgagcgaaggcgggagctcggacaggaacatcttggagtttctccgtggactcgggtcgaggaaatccgagcggtcgggagcggcggaagatctgtagtctcgtgctgtttctcgtggaaaatctgctgtccgtcgttttgatgtctcgtgccatttttctc

SEQ ID NO: 571 - DNA, 1020 bp, Triticum aestivum
acttaagctccactacaacaagggagaggagagaacacgatggccacttcatcagtcctcctccctgtgctcctcctggtggccgtcgccggcgcggaggcggcgaccttcacggtgatcaacaagtgccagtacacggtgtgggcggcggcggtgccggccggcgggggcaggaagctggacgcggggcagacgtggagcatagacgtgccggcgggcacgacgagcgggcgggtgtgggcgcgcacggggtgcagcttcgacggcgccggcaacgggcggtgccagacgggggactgcggcgggaagctgcagtgcacgcagtacgggcaggcgcccaacacgctggcggagttcgggctgaacaagtacatgggccaggacttcttcgacatctccctcatcgacgggttcaacgtgcccatgtcgttcgtgccagcacccggcacctccgggtgccccaagggcgggccgcggtgcccgagggtgatcacgccgcagtgccccagcgagctgcgggccgccggagggtgcaacaacgcgtgcacggtgttcaaggaggaccggtactgctgcacagggtcggcggccaacaactgcgggccgacggactactcgaggttcttcaaggggcagtgctccgacgcctacagctaccccaaggacgacgccaccagcatcttcacctgccccggcggcaccaactaccaggtcatcttctgcccatgagtggccatgaaagggtctcgagcacatagacaagaataagtctatgtctatccgttcttatatatcaaaataagtgcaactggatgcatacattcgtacgcacatgtaagccggaaatggatgtattcgatcgacgtgcgtaataaagtcgtgcatgaataaaatgctcttgcgtaataaatacatgcgtgcatgttcttgtagtagatatgattgagtgttcttgtagtactactactagataagatatctataggtgactacattgcctaagagcatggttaataataa

SEQ ID NO: 572 - DNA, 380 bp, Triticum aestivum
gccgggtgccaactcgaagacgaacgccaaagtccaacccacagcccagcaccatcaagttgccatgtctggagcccaaggcgcacagcccaagggagctttcacggcgaccacgtacaggtcggcggcagctcccgacggcgcggaggagtgccagcagcagcagtcgccaaggacagagctacggtcgagcaaggacgagcatgggttgccggtgaagatgctcgaggagaaggtcgaagacgccactgggaagggtggcccggtgttcggtgccggcgcggaggacggcaagcccgacctgggcgtcacaggcaccggcggaggctaactgctaagctagttgttacatggcgtgctttgcgcagcacatgtattga

SEQ ID NO: 573 - DNA, 641 bp, Triticum aestivum
cactaacaaagacatacacaccaacatttcattagtgccattctcattacgacaatcacctttgctgctgctttcaccctgcctggaggatacagcagtgttgatggaagcgagggacttccgatcatgtctcagaagattgcatttcaagcattcttgatctctgacaccttagcaatgtgctcctcatttgccgttgccttcatatgtgtcatagcaaggtgggaggattacgagttcttgatttattacacatctttcactaagaagctcatgtggtttgcatatgtggcaactacgacggctttttcaactggtttatacacggttttagccttgcgtctccattggttggccactgcaatttctgttctggtagctttactgcccattctaactaaacttcttggcgaatggcctgttttgaagctcagattccgattgggaaaaactttcaactccgatctcttagacatggtgtgatctcaacatttgtctgattgttccgatttcagacaataatttgtaatttatatgtaatcaacattttttggctactcattttgtgttgtcgactcgtggcgagaaaatagttaagtattattcttgtatacctttgaaatttcggacaaaatattaat

SEQ ID NO: 574 - DNA, 618 bp, Triticum aestivum
acacggcagaccgatccagggacgttgggagacatatggacgacatgcgtggagagcccgagcgcgctgctcatgctggacccttacgcggcgtgatgagcagcatcccgccgtcggagacgccgttcccgcaccggcaggggaacctctaccagcgtccagtactactccttctggtacgagaacgggacggcggcggcggagaagcggatgagctgggtcagggggctgtacaaggagatggagccctacgtgtccaagaacccgagggcggtgtacgtcaactacagggaccttgacctggggacgaatgagctggacggtgacgtgacgagctatgagaaggctagactcagctggggagacaagtatttcaaaggaaattttaagaggttggcagccgtgaagaccatggtggatccccatgatttcttcaggaatgagcagagcatccctcctcttcccactgccaaaatgatgatagattccatttgagactcttaattttggtttctattgctaaatttgtgcgtcttggtgacgtgacgtgtttacaatattcatggatgaaaaagtatgtgtatcgtgtcaagtttatgaaaaataataaataaaatg

SEQ ID NO: 575 - DNA, 606 bp, Triticum aestivum
  misc_feature (437)..(455): n = any nucleotide
gtcacgtcgcgcagatcaatcgggctcaacaccatgggcatctccctcgtccgcattgactatgcgccaaatggcctcaaccctccgtcacacccacccgcgctccaccgagatcttgaccgtgctagagggttgcctccacgtcggcttcgtgacctcgaaccctgagaacagacacttcaccaaggttctcgccaagggagatgtgtttgtgttccccaagggcctcgtccattaccagttcaataatgggaatactcatgcggtggccatcgcggcgctgagcagccagaaccctggagtgatcacggtagccaacgcagtgtttggatcggagcctgccatctcagatgatgttattaccaaggccttccaggtggagaagaacacggtagattggatccaagcacagttctaaaaagtcttgtgttgcggcnnnnnnnnnnnnnnnnnnngaagtactattttatctttagcttcatttggattgcattgcatgttcttcataagtattgtaagttgaggatttttaatcctcatgtgtatgttctttacctatgtaacattgatgtattgtggtacacacctctatttgtttattgcaaa

SEQ ID NO: 576 - DNA, 569 bp, Triticum aestivum
catttgaaagcttttggctagattttgggcatgtccagcttgctaagattctgatagataatggcttttcctgggacaacctaacgatgttaagattctactattcagtagagcacccagtgactgcggatgtgatgtcccgtgtattttctgaggcattcgccgagcttgaagaaggtggtgttggttcctgcacacctgatggggttcctattttcaaacatcgtgccagtgtcggcatctggttgcttcacatcgttaagcgacattatatcatgcgagctattagcttcgaaagtttaagacaagaacttggcttgcgcatgtacgtgcatgatttgtttggtactcgctgaaatgcagttcgtttctttggccttttgggaggttggagccttagcatctccagtctaagccagaacttggcttgcacatgcattaggtaaacaattgcgatagagttagcagcgacatttttctgtgggttttatcatatgatactacactatatgatagtacatactataaacattgggcctgattagcggtcctgaagcttgcattgacaa

SEQ ID NO: 577 - DNA, 463 bp, Triticum aestivum
  misc_feature (203)..(224): n = any nucleotide
  misc_feature (332)..(355): n = any nucleotide
ggtgcaccatctgcaggaggatgcttcgtcgtacggggcaggcgctcggcggccacaatgcgctgccactatctgggacggcacgtcggtgtccgtctccgttctcggcgtccgcgtcgtccgcctcgtcggccgtcaggaacttcgacctcaacctgatgccgctgccggagagcacagccgccgccgggatcaagaggtgnnnnnnnnnnnnnnnnnnnnnnagtccactgccggtcaagaagctcaggatgtcccactaatgacatcatacgccatcttgtataacatagagatctgcccattgatcgactctattgaacagagtctannnnnnnnnnnnnnnnnnnnnnnncaactcactaattgtttggtttctgtcatcgagtatgcaacaagctaagctggtgaccatggatcttccaagattgattgtcgccaagggacatatatggttctagga

SEQ ID NO: 578 - DNA, 431 bp, Triticum aestivum
aatatttttcaaggagtgggattctcagcgtaatccataccctgacagcagtaatacggacaaattgaggaatttcatcaagcatatttacgtggagcggagatatacaggagaaagaagctctgatagaccaccgaggggaaaggacgataaggatgaacatagcgaaaatagaagatctgatggaaatcggggtggttcaagaagtccaccatacaatgaaagttactctgaccgtcggagttatagtggacggagtgatgacagaaattccagacattcctatggagaacgtagtcctggctatgaccagaatgactataagaaaagcccccgccactttgaagctgtcgacgatagatctgggaaaacaactccagtcagtttaattgattttggtgcagatcctgaacccctgcatctgccccgcc

SEQ ID NO: 579 - DNA, 405 bp, Triticum aestivum
cacttcgtggacatcacggcgctgtcggagctccgcaaggacgcgcacacctcggtgcacacgctccggcaggggaagctgctcacgccggagcagcaggccaaccccagacgtacgccgactgcatccactggtgcctgccgggcctgcccgacacctggaaccagttcctctacgcccgcatcgtctccggcgcctccgcccacaccacagtagcctccgtcccataggtaattaaaacggagctccacgaggctcctccagtgagtgttgcatacagatacagaacagaagagtaaagggcagttgaaagaactcatttttcaccatttttctgctggttgcgtaaagccgtcatgtgcggttaacctgtgattctttttgttcaaagaaatggaaggtttt

SEQ ID NO: 580 - DNA, 1582 bp, Triticum aestivum
ggaaagagaaagggtagcggacaggccggaccggagcagcggaagcctcaccaccttcctccgattcagatctctcctcccattccaccgaccggaccccccttccgtctcaagtcctccacaccaaacgcctctcccgatctcggcaacgacctcctcgtcgtacagggggccaccagcggcggcggaggccaatggaggccatccgtaagcaggcatccaagctccgagagcaggtcgcccggcagcagcaggccgtgctgaagcagttcgggggcgggtacgcggacagcgtgttcgcggacgagggcgaggcgcagcagcactcgaagctcgagaagctctacatctccacgcgcgccgccaagcacttccaaagggatatagttcgtggggtcgagggctatatcgtcacaggctcgaagcaagtcgaattaggcaataagttatgtgacgatggcaagaagtatggtgttgagaatacctgtaccagtgggagtacattgtcgagggcagcgttgagttttgcgaaggcgcgatccctgatggagaaggaacgggcaaacctgctgaaagcgtttggcacccaggtaacagagccactgagagccatggtgatgggagctcctttggaagatgctcgtcaccttgcccaaagatatgacagaatgcgtcaagaagctgaagcacaggccattgaagtttcaaagcgccaaatgaaattaagagagacatctggaaatggtgatatgatttcaaggttagaggctgctgagtcgaagctgcaagagttaaaatcaaatatggggactctgggcaaagaagctgttgcagcaatgactgctgttgaagcccacacaaaggctgacattacaacgacttatcgcgatggttgaatctgagagaagttaccaccaagggtcctacagattctggatcacttgaaagagagatggtatctgagcgacaaagaattgaaggagcacctcctccagtcattgagaattctatgccaccgccacccgcatatgaagaagttaacggtatattcatgaggactccaacagttgcagaattggtggagacagtggagcacttcctggctgaggcaatccagtcataccgagctgagagtgaaactgagctcaacctgtcaactggcgactacatagttgtccggaaggtgtcaaacaatgggtgggctgaaggtgagtgcagggggaaagctggctggttcccttccgagttcatcgaaaaacgggaccgtgtactggcgagcaagtcgcccaggtcttctagaagttcattgagccatacatgtccctggcgttgtacaatgtgcattatgatgttctatcgtctccaaagacgttgatcagtgaagagctcgtggaaattcctttggttctatatatgttctttttgtcgagacatgtccctgtcggatggcttgttggtagctctgtgcactgttgttcatcttcatcctcccctcaaatatgacactgacttgaccatttttttgagaattttttgtgcggggacccaaagtatatatatatatatgtcaaggaggaatcca

SEQ ID NO: 581 - DNA, 1202 bp, Triticum aestivum
gctttctcagcaatagcagctgttgaaggcatcaaccagattgttacgggcgacatgatccctctgtccgagcaagagcttgttgactgtgacacttcatacaacgagggatgcaatggaggtctgatggactatgcgtttgagttcatcattaacaatggcggtatcgactctgaggaggactacccctacaaggagagggacaaccgttgcgatgctaacaagaaaaatgcgaaggttgttaccattgatgggtacgaggatgtgcccgtgaacagtgagaagagtctgcagaaggcagttgcaaaccagcccatcagtgttgcgattgaggctggtggcagggcattccagctctacaaatcgggtatcttcactggaacctgtggaacagcacttgaccatggtgtcgccgccgttggttatggtacagagaacggcaaggactactggctcgtcaggaactcctggggtaccgtctggggagaggatggttacatccggatggagcgtaacatcaaggcatccagtggcaaatgtggtattgccgttgagccttcctacccgacgaagacgggcgagaacccccctaaccccggcccaactccaccatctcccgccccaccgtcttccgtctgtgacagctacaacgagtgccccgcgagcacgacctgctgctgcatctacgagtacggcaaggagtgcttcgcctggggctgttgcccactcgagggtgctacctgctgcgatgatcactacagctgctgccctcataactatcccatctgcaacacccagcagggaacctgccttgcggccaaggacagtccactgtcagtgaaggctcagaggcgtaccctggccaagcctatcggtgctttctctgtcattgcaactgacggcaagaaaagtagcgcgtaaacatttgcatcaccacaatcctacagccaacggccatggtggttaacttctgcaaatgatcacctggtgacccacgatagaaggcgcagcatggcaatagctgtgctctcaagtatcttctttatagtagatgctcctgtacataatcctaaaatcgggttcggttgttcacagaaccgccacatttgcttttgcatatgtatatgtaaattcagcacattcccaggcagtttggggctgctattgttatatggaattcatcaagaaacaagataagcaga

SEQ ID NO: 582 - DNA, 763 bp, Triticum aestivum
cttgtggctcaacctctggggtacctctcatagaagtcaatgctcagcaatactaccagcaagaagctgcaaagctgcgccaccagatccagatgctgcaaagcactaacaagcacttggttggtgattctgttgggaacctgtcactcaaggagctgaagcaactcgaaagccggcttgagaaaggcattgcgaagatcagggccaggaagaatgagctcctatcttctgagatcaactacatggtcaaaagggagatagagcttcagagtgacagcattgatctcagaaccaagattgcggaggaggagcagcggttgcagcaggtgactatcgccaggccctcggtggcgccggagctgaaccctttcaccgcactggacatgaagtgcttcttccctgccaacctcttcgaggcggcggtgcatgcgcacgcgcaggcacaggctcaggctcaggctcaggcctcgcttcagctgaacctaggctaccagcagcttgctccaccgggcgccggcgatgtggctcatcagttctagtcaacctgcaggagctcttgcttgactacacacactgcaataaaactggaaagtcgtcggcagtgttatcagtactcaactgttccggtcaaaccgtctggctaagatatatgtgtgctaagttttattgtctcaagtacctctaaatttgccgctggtgtagaaccaaatttctgagataaaacctattgattaataattatttttttccttttcttttttga

SEQ ID NO: 583 - DNA, 773 bp, Triticum aestivum
ccggacgtgctctgcccgcgtgcgcgccgagttgtccacggtctggtcgccggagtccggcaagcccatcaccgccgagtaagatccaggcgatgaagtacacccaggcggtggcgcgggaggtggtgcgctaccgcccgccggcgacgctggtgacgcacgtcgccggcgagccgttccagctgacggagtggtacacggtgcccaagggggccatcgtgttcccgtcggtgtacgagtcgtcgttccaggggttcacctcgccggacgcgttcgacccggagcgcttcttctcggaggcgcgcagggaggacgtggcttgcaagcgcaacttcctggccttcggcgccggcgcccaccagtgcgtcgggcagcggtacgccctgaaccacctcgtgctgttcctggcgctgttcgtgaccgtcgccgacttccggcgggacaggacggccgggtgcgacgagccggtgtacatgccgaccatcgtgcccagggatggctgcgccgtgtacatggagcagcgctgtgacacgttcccatcgttctgagctggtccggcttccttgtcttgtccccttcgcccacagatttcctctgtctctcgtcccttcctcattcgtttacgttttctattcatctggtcatgtcaatgtgatgattgttgtctcgcccgggttggtccattcatcaatttattattttgtttgtcattggtttgctggccggctggccgcatgcgtgatgtgctgatattgtattggggttaaattggc

SEQ ID NO: 584 - DNA, 539 bp, Triticum aestivum
atatagttcaacttagagagagaaagaaagttgatcatccatggagagggttgcatcgagctgtctcagccttctggcacaaaggaggggttactcggtggcggcggccgtggcgaagggagccggccggagggcggacgagaagaaggtggcgcggcggtggccaagcgcacgatggcgaaggccgccgaggagaagacggcgtgggtgccggacccggtgaccgggtactaccggccggccggcggcgcaaaggaggtggacgcggcggagctgcgcgccaagctgctctccaactccaagaggatggctgccaactgagacagatcgtcgacgtatcggtcggtcgaggctagctatgtactctgctttgagatgcgcgctacctagttgatcgctgtcgctggcctccttttgagagcttgtgaggcctaatttgagttgcttcgttgaggacgactgcttctttgggttcgtcttctcggtgttctctaatatgaaatgagctacctttgttcagatggtatgaagattgataa

SEQ ID NO: 585 - DNA, 471 bp, Triticum aestivum
  misc_feature (110)..(132): n = any nucleotide
tgtgcccctccccctgtcccctccagcgcgcgcgagagagctgagctgagcttctcggttagctgagctgagctgctttggtggtcgggacggtcgaacggcgcgtagcnnnnnnnnnnnnnnnnnnnnnnntcgatctggagctagcggtcccggacgcggcggccggcggcgacggcatggggcgtggccgggtcgagctcaagcggatcgagaacaagatcaaccgacaggtcaccttcgccaagcgccgcaacggcctgctcaagaaggcctacgagctctccgtcctctgcgatgccgaggtcgcgctcatcatcttctccaaccgcggcaagctctacgagttctgcagcggccagagcatgcccaaaacacttgagagataccagaaatgcagttatggtgggccagatacagcagtacaaaataaggagaatgagttagtgcagagcagtcgaaatgagtacc

SEQ ID NO: 586 - DNA, 1004 bp, Triticum aestivum
gttcgcgccatgtgagaagctggggattgctgcagagcacggctacttcactaggtggaggaaggaatcgccatgggagacctgcgggctggtggcggacttcgactggaagaagaccgccgagccggtgatgagactgtacacggaggccaccgacggatcgtacatcgagcacaaggagagcgcgctggtgtggcaccacgacgaggcggatccggacttcggtttcattccaggcgaaggagctgctcgaccatctcgagagcgtgctcgccaacgagccagtcgtggtgaagagggggccagcacatcgtggaggttaacccccagggcatcagcaagggcgtggtggtggagagcctcctgtcgtccatggtgcgcggcggcaaggcgccccgacttcgtgctctgcatcggggacgaccggtccgacgaggacatgttcgagagcatcgtgtgcccggccaacggcagcgtgaagctcccggcgacgagcgaggtgttcgcgtgcaccgtggggaagaagccgagcatggccaagtactacctggacgacacggtggacgtgatcaagatgctgcaggggctcgcgaacgcgccgtcgcagcagcggccgtggcccgtgcagctccgggtcaccttcgaggaaggaaacggagtatgaacaaaccaaggaggagatgtcaataaccagtgaaaaaagaaggacgacggtggtgatgatgataatgatgattcagcgagtcggttggtgtggttttaggattagctgcagttacaggataaacaggtttctttcttcttctttcttctgcttctttttctggtttacgtttccgacctcttcctctcgcgcacgcatatacatatgcccgcccgcccccatacattgagcgtgagagggagaggtttgttccttcgggtcacattgtatatgtagttgacgatgacgatgaagatgaaatcaatcagagcaagaaaaatgattctttccaggcccccca

SEQ ID NO: 587 - DNA, 428 bp, Triticum aestivum
cgggagcgcaagacgatgtaccgcggcatccggcggcgaccgtggggcaagtgggcggcggagatccgcgacccggccaagggcgcgcgcgtctggctcggcaccttcgccacccccgagggcgccgcgcgcgcctacgaccgcgccgcccgccgcatccgcgggaccaaggccaaggtcaacttccccaacgaggacccgcccctcgacctcgacgactacgacgttgccaacggcggctacaacgtcgccggcttcttccaccagccgtcctacatggccgaagccaccgcgccggtgccggaggcggcgtacgctcaccagctgccgcatcatgacgagcccgggatggagctctggaactttgacaacatcaacacccaagtgcctatgtgatagatagtaactggtctctatctgcttgcatg

SEQ ID NO: 588 - DNA, 754 bp, Triticum aestivum
  misc_feature (118)..(153): n = any nucleotide
gctgcggcacgtcgtctcccgggtacaccacggcgccgccggaggtcgtcgtggccgtggcgtgcgggcggtggcggcatcgacggctgcctctgggtgcgacttctttcggggccgnnnnnnnnnnnnnnnnnnnnnnnnnnnnnnnnnnnngaggggtgcagaggaagcggcggaggaagaagaacgtctaccgcggcgtgcggcagcggccgtggggcaagtgggcggcggagatccgcgacccgcgccgcgcggtgcgcaagtggctcgggaccttcgacaccgccgaggaggccgcgcgggcgtacgacctcgccgcgctcgagttccgcggcccgcgcgccaggctcaacttcccgtgctccgacgggcccctgcgtgagcatgggagcggcaatggcggcgatggtgacgctggcgcggcgccgcagaacgagactctggccagcgccgtcgccgtgcagcacggacgccggccagaggacgccgggagagtggcagctgggtgcgggcggagccggcgaccagctgtgggaaggcctgcaggatctcatgacgatagatggagaggacccgtggttcgcgccattttcgagtccagcataggtgtatttgagatcttgtatataaggatgattactgatagtgacagataccagctgttgggaacagactaactgagaaacgtagtgatttattcgttcgatttgttgagacaagcattgccagcacacagtcgcttagttcgtta

SEQ ID NO: 589 - DNA, 1015 bp, Triticum aestivum
  misc_feature (561)..(587): n = any nucleotide
caacgtccgtccgccgctgaaaacacccctcccagtcccagcagcagccttgctccccttgtttccactccgccttggatcgatccatccatcgagccttctccagttagcctttcccgccacctaaaaaggcacccgaggtcgccgtccatccatgtgcggcggcgccatcatctacgactacatcccggcgcaccgtcgccgggtgtccaccgccgacttctggcccgacgccaacgaccactccgacgcctacagcgccgcacccgacaaagcgccgcgcgcgaagcgggggcggacgaaccagtaccgcggcatccggcagcggccgtggggcaagtgggcggccgagatccgcgaccccgtcaagggcgtccgcgtctggctcggcacctaccccaccgccgaggccgccgcgcgcgcctacgaccgcgccgcgcgccgcatcaggggcgccaaggccaaggtcaacttccccaacaagatcctcgtcgacgggcccgcgcacgaggcctcgtgcacgatggctgctccgccggcggccgtgctcccatccccccnnnnnnnnnnnnnnnnnnnnnnnnnnnagcacgcggcgtgctcctgcgaggaggtgaaggcgctctccgaggagctgatggcgtacgaaaactacatgagcttcctcggggtcccctacatggagggcgggaccgcggccacggccgcccctgccgccttcggtgtcgccgccgaggaggcgccggccgagctatggagcttcgaggacagctactacccggggcctctggggctctgattgtaccgtgctcgtgttagtcgctcaaaacagagtcgagattttcccttctgttctgttgaattcattttttttttcaatttgtaactctggtaaaatgcctcaacgtaacttttacaagttctcgtggccgtgtaaataggctgtttgacccactctgtgttgaagtaaccttgtgttcagttttccaattgcaactgtggtggatgcctcaag

SEQ ID NO: 590 - DNA, 1185 bp, Triticum aestivum
cagtgtccgagctcagctcagctacccacacttcactcagtagcagctaccggtagcgagaaagaaagatcgatagtgcgacgtgcgcgatgacgacggtggcgataggcattctggccatggcgtgcctcgtggcggtggcgcggggcggcaacttcttccaggactccgagatgacctggggggacggccgcggctcgaggtcgtcgacggcggccgcgggctcgacctcacgctcgacaagacctccgtctccggcttccagtccaagaccgagtacctcttcggcaagatcgacatgcagatcaagctcgtccccggcaactccgccggcatcgtcaccaccttctacctgtcgtcgcaggggacggcgcacgacgagatcgacttcgagttcctgggcaacgtcaccggcgagccctacacgctgcacaccaacgtgttcgcgaaagggcaggggcagcgggagcagcagttccgcctctggttcgaccccaccaaggccttccacacctactccatcatctggaacccgcagcacgtcatattcgcggtggacggcacggcgatcagggacttcaagaaccacgaggcgcgcggcgtgtcggttccccaagagccagccgatgcggctgtacgccgagcctgtggaacgccgacgactgggccacgcagggcggccgggtcaagaccgactggagcaaggcgccgttcgtcgcctccttccgcaacttcaacgccgacgcctgcgtcatgtcgggcggcgcgcagcgctgccccgccggcacaatggaggcctctgcggccggcggcagcggcagctggtggaaccaggagctcagcggcatgggctaccgccgcatgcggtgggtgcagaggaagttcatgatctacaactactgcaccgaccccaagcgggtggcgcagggcgtgcctgccgagtgcaagctccgctgatgagatcctcccgcagcttacaagaacaacaacgcatgaacccgtcatctgagatgtgttttgtttcggctttcgatccgtgagaacgaaggaaggaaggaagtgcgcgcatcagagctctgtcggatggtgtaaatgtagtaccgtagtatgcatatcgcattctttcatttgtttcgttgtcacacgggtcgttccatgtacttatgcaagttctataattagcta

SEQ ID NO: 591 - DNA, 962 bp, Triticum aestivum
atggagccgaggttccgcggcgtgcggaagcggccgtggggcaggtacgcggcggagatccgcgacccggccaggaaggcgcgcgtctggctcggcaccttcgacaccgccgaggccgccgcgcgcgcctacgacgccgccgcgctccactaccgcgggcccaaggccaagaccaacttccccgtcggcaccgtcgccgctttcgcgcacgtcccgctcccgccgcccaaggcgctggccgtcagccccagcagcagcaccgtcgagtcctcgtcccgggacacgccggccgcgccgcccgccgcccccgcgcccccgccggcgctcgacctgagcctggcgatgccggccatggtggcggcgcagccgttcctgttcctggacccgagggtcgcggtgaccgtggccgtggccgcgccggcgccggcgccgtgccggtcggcggcgatcagcggcatgaacaaggcggcgtcccgcgaggaggagcagagcgacacggggtcgtcgtcatccgtggtggacgcctcgccggccgtgggcgtggggttcgacctgaacctgccgccgccggtggagatggcgtaggagatggaccgatctcggtcgcccgatgacgacgcggcccggaagcaaagcgaagctctctcttgggtagaacttaaagtttagaagaatggcgtgtacttactagtaagaggttaatcggccgtttaattgccaggatcgatccatcgatgggtaagggtaagtaggtgtacatagatcgcgtgcgtgcgtgcgttttttgcatggggaggcaggtagcatgatgaggaacatccatctatctgctcccgatgttacttacaatttccttaaaagcaagggaaaaacaaagacaaaaatggaagaagccagtagtagagcattttgttcttcagtgtacaatatttgatctccgtctctctgattaatgtgaaatt

SEQ ID NO: 592 - DNA, 535 bp, Triticum aestivum
ctccggtcttctctcacttgcaaccgtagtgcagcaaagcaaagtagtttcctcacacccatacatccatggcgacctccatggtttgcctggttgcgctctgcctcttgtctccgctgctcctcgccggcgccgtcgtcggcaacccgggttacggcggcctgttcccgcagttctacgaccactcgtgccccaaggccaaggagatcgtgcactccatcgtggcgcaggccgtggccagggagaccaggatggccgcctccctcgtcaggctgcatttccatgactgcttcgtcaaggggtgcgacgcgtccgtgctgcttgacaacagcaccaacatcatcagcgagaaggggtccaaccccaacaagaactccctcaggggcttcgaggtcgtcgaccagatcaaggccgccctcgaggccgcctgccccggcaccgtctcctgcgccgacatcctcgccctcgccgcccgcgactccaccatcctcgttggcgggcctttctgggacgtgcagctgggccggagggactc

SEQ ID NO: 593 - DNA, 1165 bp, Triticum aestivum
cgatcggcgaccgcgaccacatcgggtaccgggacgacggcgaggacaaggggcaggagttctcgctggagctcgaccaggagtccggctccggcttcaagtccaaggccaagtacctcttcggcgagttcgaggtcaagatgaagctcgtcgacggcaactccgccggcaccgtcacctccttctacctgacttccggcgagagcgcgacccacgacgagatcgacatcgagttcatgggcaactccagcggcgacccctacgtgatgaacaccaacgtgtgggccagcggcgacggcaagaaggagcaccagttctacctctggttcgacccctccgccgacttccacacctacaagatcacctggaaccccaagaacatcatcttcgaggtcgacggcgtgccggtgcgcaccttcaagaagtacgacggcctgcccttcccctcgagccggccgatgacggtgcacgccacgctgtgggacggcagctactgggcgacgcagcacggcaccgtcaagatccactggcgccaccaccccttcgtcgtcccctacaaggcctaccacgccaacggctgcgtgcacgacagggccaccaacaagaccgcctgtcccgccggcagcgacgcctggatgcgccgcgagctcggcgaggaggagctcaagaccgtggcctgggccgagcgcaactgcctctcctacaactactgcgccgacggctggaggttccccaagggcttccccggcgagtgcggacgcgacctatgagcgattgatgattcagtggtagcagcactagctagcagtacacctcggagccgagatttcattgattaatttcttccttccttgctactccactacagtacaatcgattgttcttcttgttcatcccatcttaccttaccttacataaacctgtgccatttttcttttcttctcttcgtgtacattcatttttgccacctttaataattgtttagaagaaatgtgaagaaagtgggaggaaaagggtggtatgcgtatagttaatattttggttgatatgtgttgacattttgtcttgggtgtcagtgtgtctacatgcatgttggctccagagagaaaaaagagccttgtatggatgcgtttctgactttttgttacaagaaagataataacga

SEQ ID NO: 594 - DNA, 787 bp, Triticum aestivum
accgcgcccgtttattattccccttcgcgcagccgcccccgtgtctcccgtgcgcaccttctcgaagcctcccccatggcggaccagctcaccgacgagcagatcgccgagttcaaggaggccttcagcctcttcgacaaggatggcgacggttgcatcaccaccaaggagcttggaaccgtgatgcggtccctcgggcagaaccccacggaggcggagctgcaggacatgatcaacgaggttgacgcggacggcaacggcaccatcgacttccccgagttcctgaacctgatggcgaggaagatgaaggacacggactcggaggaggagctcaaggaggcgttccgcgtgttcgacaaggaccagaacggcttcatctcggcggcggagctgcgccacgtgatgaccaacctcggggagaagctgacggacgaggaggtggacgagatgatccgggaggcggacgtggacggcgacggccagatcaactacgaggagttcgtcaaggtcatgatggccaagtgaggtggcggcgggacaggggtcttccctcccacgaaataagcttaaaattcaagtggattggaatgccagacagactcgcgtggttgtattttgtgctatgttttttaaggatactgttgcctgttgggtagttggtcgggttatctatcttgtagcggtgtagtcttgggggagcagcatcggaattactacctggtttcttttggttgtggcacttatcttgttcgtcttatcatggaatttaggggcgtcgtgcaaatct

SEQ ID NO: 595 - DNA, 720 bp, Triticum aestivum
cgtcagaagcgcgagtggccgcgttcctcgctcagacctcgcacgagaccaccggcgggtggccgacggcgcccgacggcccctactcctggggctactgcttcaaccaggagcgcggcgccacctccgactactgctcgccgagctcgcagtggccgtgcgcgccgggcaagaagtacttcgggcgcgggcccatccagatctcatacaactacaactacgggccggcggggcgggccatcagcaccgacctgctcaataacccggacctcgtggcgacggacgcgaccgtgtccttcaagacggcgctgtggttctggatgacgccgcagtcacctaaaccttcgagccacgacgtgatcacaggccggtggagcccctcaggcgccgaccaggcggcggggagggtgcctgggtacggtgtgatcactaacatcatcaacggtgggctcgagtgcgggcgcgggcaggacggccgtgttgccgaccggatcgggttctacaagcgctactgtgacctcctcggcgtcagctacggcgacaacctggactgctacaaccagaggccgttcgcatagtcaatcggctatatgatgcgagaagacatgcaataaagactttctaaatactgtaacaatggcgttgcgatagacctcgcctagtactacaagcgaataatggtgcgatccatcgcaagatgcgtgtgtagtcgattaaaat

SEQ ID NO: 596 - DNA, 946 bp, Triticum aestivum
gtcttgcgaaaatttcacgcgcgctcagcacaagtagcagtttcagtttcagagctccgcttcagttagccaccatgcctgccctcgccaagcccgccgccgcggcaccgaagccgaagccctccgccgccaagccgaagaaggatgccgccggcccttcccacccggcctacttcgagatgatcaaggaggcgatcgcggcgctcaaggacaggaccgggtccagctcggtcgccatcggcaagtacatcgaggagaagcacggcaagtccctcccggccaacttcaagtagatgctctccgtccagctccggtcgttcgcctccaagggcaagctcgtcaaggtcaaggcctcctacaagctctcagacgccgccaagaaggacgcgcccaagcccaagcccaagggccaagcccgccgcccccaaggccgcggcgaagcccgccaaggacgccgccaagcccaagaagaaggcggccgtgaagcccaagaaggccgccgccgccgctggcacgaagcgcaaggcgcccgagaagaagacgctggtcgccaaggccaagaagtcgcccgcggccaaggccaaggcgaagccgaagaccgtccggtcccggccgccaagaagggccgcaaggtcgccgccgcttgatctgttccgatggcacgatgggttttagttgttcttggtgtgtttgtcttcagggtatgtacaaaatggatgcctcatcctccctgatttaggtctcgattctgctaggcagtttctatgtatcgtgtgtggtgtttaattctatgaaattgctaggtttcgggagatgaaattaacttgcagatttattacccaatttctgtattttctgaagatctgtttatgcctttctgatattcagttttcactttactcggcaatgctgacacgcgtcgtcagtttgatatggggaatagggg

SEQ ID NO: 597 - DNA, 664 bp, Triticum aestivum
tctcgccagagcaccaccagaaccatcgccctcaaccaactcatcaatggcgtcgccggcgctgggggcggggacgccgccgttcctcaccaagacgtacgcgatggtggacgacccggagaccgacgacaccatctcctggaacgagtccggcacggcgttcgtggtgtggcgccgcgccgagttcgagcgcgacctcctccccaagaacttcaagcacagcaactttgcctccttcgtccgccagctcaacacctacggattcaggaagataggccttgacaggtgggagttcgccaacgagtgcttcaggaaaggggagaagcgcctgctcggcacgatacagaggcggaagggatctggcgccggggcgccgccgcccgcgatgatggcgacgccgatggcgacggcgattccgatctcgcccacgccgacgagctccggcggggacgccgcggtctcgtcgtcgccgccgcccgggctggcgctggtggccaccggcgcgatggccgagctggaggaggagaacgcgcggttgcggcgcgagaacgcgaggctggcgcggaagctcgagcgcgcgcggcggctctgcgacggcgtgcggcacctcgtgtggcggatgaccacgggggcctcactgggcccgcggctcaaagccgggcca

SEQ ID NO: 598 - DNA, 969 bp, Triticum aestivum
  misc_feature (5)..(6): n = any nucleotide
  misc_feature (17)..(17): n = any nucleotide
  misc_feature (28)..(29): n = any nucleotide
tgtgnngttccacatgnagtactagttnntgcatagttttacatctccatttgcatcttctattggagttgcttgttttacatctccaatatacatcttctctgatggacacgccggcgtccctggtcccagctcgtccgcgccggagcctcggcaatgggccggcggtcgccccgggctgggttccgcggcgcttgagctggccagcaaggtgctctgcgtcgtggcgacgtgcgccttcgccgcggtggggtcgctggttggggcggtgtcggggtcggtgatcgggctggcgacggagagcggggtagtgcggggcgccggcatcggcgccatctccggcgccgtcttctccatcgaggtcgccgagtcttcgcgggacctctggcacaccagcgactcctccgtctggagcgtcctcttcatggtggacatcatcctcagcctgctgagcgggaggctggtctgcgagaaggtggggccggcggtgcagagcgccgtgcagagtcagataagcgccatcagctcgccgttcacggagcccagtgacctgttcgagaccggcggcgcgagagggctgccagcgcacgcgctccggcggctgccggcgatcaaggtcggcgcggacaccgcggtggacgaggccggggaggcgctctgctgctcggtgtgcctgcaggaccttgaggtgggcgagtcggcgaggcggctgcccggctgccggcacgtcttccacgcgccctgcatcgaccgctggctcgtcaggcacgcctcctgcccgctctgccggcgagacatctgagcccggccggccgatcccctgcttgtaattaaattaaatcgtcattgttcgccgtgcgtcaggtgcccgtaaggggaccggtggcaaaagaagccacttttgtagcgatgcgtgaatgaatcgggaatgtgaaattctggataagaaagaagaattgttcgaggctg

SEQ ID NO: 599 - DNA, 929 bp, Triticum aestivum
gccaaacgatggctccagcttccgcctcgctcctccccgccgccggcgccaagcgccccttcgcccccgactctgccaccgacgctgctgagaaagagcaaccactcgcgcaggtcagtttctgctcagtcctcactctatctctctcttctccggcaagcgacgtacatactgatgcgcgcgtgtggtgaactgtggtgaccaggagagcgcggtgaccaagaagaacggacagaaccagcagcagcaaaagctggagtgcccgcggtgcagctccaccgacaccaagttctgctactacaacaattacagcaccacgcagccgcgccactactgccgcacctgccgccgctactggacgcacggcggcacgctccgcaaggtccccgtcggtggcgcgtgccgccgcggctccggtagcagcagcaagcgccacagatctttcgccgagccccacacgccctcctccggctcgccaccaccgccgcagccagaacagcaggacacgccgccgccgctccctgtcttcccgttcctgaccgacggcgccgtctacctgccgcagttcgacctcgggctcggcgggttcctatggacggcaccggcggccacggaccacctctacgacgggctcgcggcgccgtggggtggctgtgacggggcgctcgcccccaccggcgcttgggacgacttcggcggcctcgtgctcacctgcccgccgcctgccgggaactgaccagcgtcatcatgtcagtcagcgtgttgccggcgagttcgaggctcctgttttatcatcgcagccccgatctagtgctaatttgaacgggaaattgtacatctcctgtaaccaactacaccacactaattgtctgattacctggctcgattcatttcaggttatatttgcatgtatcaatgtatggatgtgg

SEQ ID NO: 600 - DNA, 648 bp, Triticum aestivum
tgcgccccgccagaactccccaggacttcgtggacccccacaacgcgcgcgcccgatgtgggcgtcggccgttgacctggacgacaccgtgccgcgtacgcgcagaactaccggagcagcgccgcggcgactgccagctgatacatactcccgatgccggccctacggggagaacctcttcggaggcggtgggacccagtggacggcggcggacgccgtgaactcgtgggtgtcggagaagcagtactacgaccacggcagcaacagctgctccgccccggagggcgactcgtgcgggcactacacgcaggtggtgtggcgtgactcgacggccatcggctgcgcccgcgtcgtctgcgacagcggcgacggcgtgttcatcatctgcagctacaacccgccgggcaactacgtggggcagagcccatactaggctatgcatgcatgcattcgtgcgtgcatgtacgtagcagcgcgtatattgcataaagaataaagctgagatcacagtcgtgataagatgtgagactttagcaggagagattcaaggtaagtgtagtttagactggctatggatattgtgttacgattcatgtgagttgtacgatcattaattgtaggtgcctgctatgcagtgcttatgaatga

SEQ ID NO: 601 - DNA, 740 bp, Triticum aestivum
aggcacaaagtagaaaccatcagacaccgaaccaggagtaatggaacgccccagctggccattctgctcgccctagccatggcggcttgccatggttaacctttcccaagcccagaactcgcctcaggactacctctcacctcacaacgccgcccgcgccgccgtcggtgtgggcgcggtgagctggagcacgaagctgcaggggttcgcccagagctacgccaaccagaggatcaacgactgcaagctccagcactccggcgggccctacggggagaacatcttctgggggtcggccggcgcggactggaaggcggcggacgcggtgaagctgtgggtggacgagaagaaggactacgactacgggtccaacacctgcgcgggcgggaaggtgtgcgggcactacacgcaggtggtgtggcgcgcctcgaccagcatcggctgcgctcgcgtcgtctgcaacaacaaccgcggcgtcttcatcacctgcaactacgagcccgccgggaatgtcgttggacagaaaccatactaactgtgatcgcttcgcagtacatacatagtccaatagtccctcgttccttgcatggcagcacccatgcaaggattcatgcacgttcctatgatcctatctactgtataactagctagaggggctgggcgagtagataaaaggaatgccgtaacaagctatgtatgtattctaccgtcatggactacaatacataatgagccttttc

SEQ ID NO: 602 - DNA, 1318 bp, Triticum aestivum
gaaaggcgcggctgctggtctctctagggttcgtcggcccggcgcgggggtgcggcgggggacccgtgcttctgcttccgcaccgagagtatggctggaaggcacaccattgttctcgtgcaaccatctccaaacaaagcgtccagaacttttatggacttcagttcactcaaccaagcactggatggtatctgtgcccgttatgaaaagaaaatcatggatatcaacccgatggccaggaacttcacttatgacatcaccgacctctacaatttcatcgatggcctagcggacatcagcgcgctagtgtatgatcatcaactccaagcttttttgccgtatgacaggcagtggataaaacagaagatgttccagcacctcaagaaccaggcacggcagtagccagccgctggttctgattaacaaaagcaagtgtacaaggtggtatgtctgttgtctgtagtttcagatggtgtgagagacctagggttcatgtgctaattgtaagagaagatgatcgatttgcttggctatctgccatttctgatgcgacaccgacacaccgtagtactccctccgttcctaaatacttgtctttctaggcatttcaacaagtgactacatacggagtaaaatgagtgaatctacactctaaaatatgtctacatacatccgtatgtgatattcatttgaaatgcctagaaagacaagtattttggaacggagggagtagtagtaatcaaacgtacgctggattctagtaaatcgaaaatgcctcgctcaaatcatcaaaatcgagatctagtataatgtctactgcgggttgggtggcctagagttggcggcggagaccctggatccccactcgaggagctccttgctggtgtcgtccttgtgcgccaccacctcgatgaagcacaggcagtccttcttctcctcggtcgctgtcgcgatggccgccgtcagctcctcctcgcacgtcaccttggcggtccagcagttgccctcgccgttgtggatggcgtcgatgaggccggtgtagttccagttcttgatgacgttgtatggcccgtcgtggatctcgacttcgatggtgtagccaccgttgttgatgaggaagatgatgctgttctggccgcagcggagcatggtggacacgtcctgcgccgtcacctggaagctgccgtcgccgatgcaggcgatgacgcgcttgtcggtggcgccctgcgcatagccgagcagcgccccgacggaccacccgatggagccgtactgcatctggaactcgtacccgcagccgtcggggagcttgagcttc

SEQ ID NO: 603 - DNA, 943 bp, Triticum aestivum
caaacacagtcacacacagacacacaacccgatccctcactccctcgcgtgtactagcaaccaagggaaacaatggcgccggtgaaggtgttcgggccggcgatgtcgacgaacgtggcccgggtgctggtgtgcctggaggaggtcggcgccgagtacgaggtggtcgacatcgatttcaaggccatggagcacaagagcccccgagcatctcgtcagaaacccgttcggccaaatcccctgctttccaggatggggatctgcttctcttcgagtcacgcgcaattgcaaagtacgtgcttcgcaagtacaagaagaacgaagtcgacctgctgagggaaggcaacctcaaggaggccgccatggtggatgtatggacggaggtcgacgcgcacacctacaacccggccatctcgccgatcgtgtacgagtgcctcatcaacccgctgatgcgcggcctgccgaccaaccagacggtggtggacgaaagcctggagaagctgaagaaggtgctggaggtctacgaggcgcgcctgtcccagcacgagtacctcgccggggacttcgtcagcttcgccgacctcaaccacttcccctacaccttctacttcatggccacgcctcacgcggcgctcttcgactcgtacccgcacgtcaaggcttggtgggagaggctcatggcgaggccggccgtcaagaagctcgccgcacaaatggttcccaagaagccgtgatttgctaggcgggatttcgcatcgtgggatccgattccgatcactgatctgcgtggcgttttcttgttggtgtcgcgaataaggcaatgagcttgtgtggctggaattgcaccagcgtgcagtttttgtgcttgcgtatcgtatgtgtggttgtgaaaactctcgagatggaataatgtcttataaggctttcgatgtgttgcttgtca

SEQ ID NO: 604 - DNA, 1233 bp, Triticum aestivum
cgaggattattgccgccgcttaaggaaccagacctgatcgacggccatccagggagctaggccagggatacacatacatgaggcgccgcgccagaggaggagagcgaatgcgctgcgggtagtgcggtgtggtggtgctggcgatgcggcgcggcggagatcatcgtgcagcaggaggtcagcaagggcgtctccggcagccccggcaccgccgccggcctcctccggctccacttccacgactgcttcgtcagggggtgcgacgggtcggtgctgctggactcgacgccgggcaaccaggcggagaaggacgcggcgcccaactcgagcctgcgggggttcgaggtgatcgacgcggccaagacgcggctggagcaggcctgctacggcgtcgtctcctgcgccgacgtgctcgccttcgccgccagagacgccctcgccctggtcggaggcagctcgtaccaggtgccggccgggcgacgagacggcaacgtctccgtggcgggggagaccaacgggaacctgccgccgccgaccgccaacgtgaaccagctcaaccagatcttcggctccaagggcctctcccaggcccagatggtcgcgctctcaggggcgcacacggtggggatggcgcagtgcagctccttcagcagccggctctactcgtacgggaccaacggcggcaaggaccccagcatggacccggcctacctggccaccctgagcacgcagtgcccgcagtccggcgccagccagcccgtggccatggaccccgtcacccccaacaccttcgacaccaactactacgccaacgtcgccgccaaccgcggcctgctcgcctccgaccaggcgctcctcgccgacaacagcaccgccgcgcaggtcctcggctacaccaccagccccggcaccttccagaccgacttcgccagtgccatggtggccatgggcgccatcggcgtgctcaccggcaaccaaggcaccatcaggaccaactgcagggtcgtcggctagctgctcgtccatcaggaacctgaactgaatttggttctagtatagagtgtaagaagctgtttgatcattcgtttggtcgatctgtactagctagctagcttagcttagcccgaccgtcctctctcttcttcttcttcatcatatgcagcatactttctttctctgctttttgtattctcttgattagcctctgtatgtatgtattaactatctagcaac

SEQ ID NO: 605 - DNA, 563 bp, Triticum aestivum
  misc_feature (443)..(443): n = any nucleotide
gacatggatcggatgtggcgttccagcgcgggatgaccacatgggccaactgggtggacctcaacgtcgacccggccaagacccgtgtcttcttccagtccatgtcccccacccactacagctccaaggagtggcccaacccagtgtccaagaactgctacggggagacggtcccattgactgggctcaactccacagcgcagccgatgggccaggagcaggtgacgaaaacggtgctgcagaccatgaaatgcccggtccgtttgctcgacatcacggcgctgtcggcgctgcggaaggacgcgcacccgtcggtttacagcggcgacttctcgccggcccagcgcggcaaccccgccggctccgccgactgcagacactggtgcctcccgggcctaccggacacctggaaccagctcttctacaccttgctcttctaccantagcacccgtactggactgttgctgcatttcgccagctgctgcagatgcagtgttggtattaattatttccatctgattttcgctgtggatgtatgtccataccctgctacaaggactca

SEQ ID NO: 606 - DNA, 724 bp, Triticum aestivum
cgcacaagcactcttctaggtctagccaacccgtacgtgcaagcacctctgcaccatcgggttttcagcagccatggtgccgaaggctccctcctcgtggccctcagcctggttctcgtcttcaccgtggccaacgcgtgcggcgatactgcccgacgccgactccggcgaccccgacaccgacgccgtcccacagcaagtgccccaagaacgcactgaagctcgctgcgtgcgccgacgtcctaggcctcgtcagcgccgaggtcggccagccgcccggccgagccgtgctgcagcatcctcggcggcctcgccgacctcgaggccgccgtctgcctctgcacggccatcaaggccaacgtgctcggcatcagcctcgacatccccctcaagctcagcctgctcgtcaactactgcggcaagaacctcccaagtggcttcatttgcgcttgattaaactacgtagttcatcatgtattcatgtacttgcatgcagcgcgcgcacacgaaaacaacgttcattcgtgactgcatgcatgttgggttcgtcgatatccttgtctacttactctgttggttctgaatgtagaactgcttcagatctatctggtgtgccaattgttgtgcatgtttcgtgtgtgttgcgggggagatgcaatgatgtttgtacttggggttgtatgtgcaattggtgtgtctagctatccaatgcatggagtattaa

SEQ ID NO: 607 - DNA, 730 bp, Triticum aestivum
cgagctgtccggcatccctcctgcacccaggggagttccccagatcactgtctgctttgacattgatgccaatggtatcctgaacgtgtctgccgaggacaagacgactgggcagaagaacaagatcaccatcaccaacgacaagggcaggctgagcaaggaggagattgagaagatggtccaggaggctgagaagtacaagtctgaggatgaggagcacaagaagaaggtggagtcaaagaatgccctggagaactactcctacaacatgcgcaacaccatcaaggatgagaagattgcctccaagctgccagcggacgacaagaagaagattgaggacgccatcgacgctgccatccagtggctggacacgaaccagctcgctgaggcggacgagttcgaggacaagatgaaggagctggaggccctgtgcaaccccatcatcgccaagatgtaccagggcgctggtgccgacatggagggcggcatggacgacgacaccccggctgcttccggcggtgctggccccaagatcgaggaggtcgactaaatgagtcgatgttctgttgcagaggcggtgaagcctgcttcttagttattatgtgtgtcctatgttatctgagactgggttgcggtgtgttttggtacgagtggtcagggttattctgtgcgagttgacattcgtggaacatcagtggattatgggtcacgtcacgtctaagtaatacaa

SEQ ID NO: 608 - DNA, 927 bp, Triticum aestivum
cgacgggtcgattctgctggacaacagcacgagcatcgtgtcggagaagtacgccaagccgaacaacaactcggtgcgcgggttcacggtggtggacgacgtcaaggcggcgctcgagaaggcctgccccggcgtcgtctcctgcgccgacatcctcaccatcgccgccaaggtctccgtcgaactgtccggaggcccccggtggcgcgtccagctcggccgccgcgacggcaccacggccaacctcaccgccgccaacagcctccttcccagcccccgcaacaacctcaccatgctccagcgcaagttcgccgccgtcggcctcgacgacaccgacctcgtcgccctctcaggcgcgcacacgttcgggcgcgcgcagtgccagttcgtgacggaccggctctacaacttcagcaagacgggcatgccagacccgacgctggacgggagctaccgggcgcagctcgccgggagctgcccgcggcggcacgggaacaggtcggcacccaacgacctcgacacgaccacgcccgacgccttcgacaagaactacttcaccaacctccagggcaaccgcgggttcctccagtccgaccaggagctgctcgcggtgcccggcgcgaccacggcggcgatcgtcggccggttcgcgagcgacgagaaggctttcttcaggagctttgccgcggccatgatcaacatggggaatatcaagccgctgacgggcgggcagggggaggttcggaggaactgcaggagagtcaatggaagctagagtgaccgagtgaggaagcgtggtttagcttgtaccatgtacaatttctgtgtcatgcatgcaagcatgtacgtactacattgttgaacctctttaatttattcaaaaagtctatttgtgaacatactttaatttatgaatttgtatgtgat

SEQ ID NO: 609 - DNA, 617 bp, Triticum aestivum
acgcagatgctgctgagccagctggtggtgggcaccctgatcgcggtcaagttcgggacgagcggcgtgggggagatgcccaaggggtacgcggcggcggtgttgctcttcatctgcctctatgtggccgggttcgcgtggtcgtgggggcccctggggtggctggtgcccagcgagatcttcccgctggagatcaggccggcggggcagagcatcaacgtgtcggtgaacatgctcttcaccttcgtcatcgcgcaggcgttcctcaccatgctctgccacatgaagttcggcctcttctacttcttcgccggctgggtggtgatcatgaccgtcttcatcgcgctcttcctgccggagaccaagaacgtgcccatcgaggagatggtgctcgtctggaagggacactggttctggcgcaggtacatcggagacgctgacgtccacgtcggcgccaacaacggcaagggcgccgccatcgcatagattccttcctttcctagctccgtctccctcgtgtacattaattgcttttcttcctctcttccttgtttgtcctcgtagatgcatgcttaggtcaaaccgtgtgtttctcttctgtatgtgcttcaagaatc

SEQ ID NO: 610 - DNA, 948 bp, Triticum aestivum
  misc_feature (718)..(718): n = any nucleotide
  misc_feature (722)..(722): n = any nucleotide
ggagtgcgacagctggtgctgggcgtggaggcgcacaacgtgcgggactggaagacggtgcccgccagctgtgagggctacgtcggccactacatgctcggtaagcacttccgccgtgactccaagatcgtcatcgaccaggccgtcgcctacgtcgacagcctcaagctcgccggcaacggcaaggaggtgtgggtcttcgacatcgacgagaccaccctctccaacctcccctactacgccaagcacggcttcggggctacccctttcaacgcgacgagcttcaacgcatatgtgctggaggggagcgcaccagcactaccggagacaaagaggctgtacaacaagctgcgatcggtcggcattaagccggttttcctcaccggacggaccgaggaccagagggccatcaccgtcaccaacctccgccgccaggggatctccgggtggatgaacttgctgctgaagcagcccggcttcaagggctctgctgtgacctacaagtccggtgagaggcaaaaattgcaggacgccgggtacatcatcgtcggcaacatcggcgatcagtggagcgacatcctcggcgcgcccgagggcgcccgtaccttcaagctccccgaccccatgtactacatcggctaggccggttgctgccacctttgattgctcctcggtcctgatccacgattgaataaactccatgctcttaatcatatgnatgnttcgtcaataatcgcccccccccctcccctccctgttgttgtttggttaatttccattgttgagaacttgagatcaattattatgtacccctccactaatgggccaattttgacccgttggatgaagggatcgtaattggcggaccaccaaacaacggtcgggagagtcaaccaagtgcccacatagaggaacgagaagttgtgcccactgatagtgtacaagtga

SEQ ID NO: 611 - DNA, 1636 bp, Triticum aestivum
ctcgccaccacacccaatcgcccgctcgctccctcggctcggcgtcgatcgatctctccttctacccgagctgctccgtcgtccggacggcgccgtcgaccgcgtgcttgccagatctgaagtcaaagcaggagaggacggacatgcagggagcgccggtggacagcccgggggcggcggaggcggcggcgcggccgagccggtacgagtcgcagaagcgccgggactggcacacgttcgggcagtaccttcgcaaccaccgcccgccactggagctctcgcggtgcagcggcgcccatgtcctcgagttcctccgctacctcgaccagttcggcaagaccaaggtgcacgccgcgggctgccccttcttcggccacccttccccgccggcgccgtgcccgtgcccactccgccaggcctcgggcagcctcgacgcgctcgtcggccgcctgcgcgccgccttcgaggagcacggcgggcggcccgaggccaacccgttcggcgcgcgcgccgtccgcctctacctccgcgaggtgcgcgactcccaggccaaggcacgtggcatcgcctgttgggagtaaaccacgcctccagacgatgactggtgtgcatgcacgggtatgcgctccaggtccgactcataaggcagcggccgttggcaagagcggagggctagtgcgttggttcgttagctagcccgcatggccgggtctcctgtgtacgcgcatgcaccgtagttagcaggttagttggttagtgcatgcatgcatcatggatatggatgccgtgcatgtagctggcttagtgagtttgttagctagactagtgcgtgcgtgcgtggagttagtggccggtgtggtggccggatggtgtgtgtgcagccgggtataaaaggcctcctgatgtattgatgaagtggagccgtgtgtagccatgtagtcactgtaaggaagaaaaggattggggcgttcgtgcgcccgtggcggcgttcgtgcgccggccggaaaatcttgtgtccattcttcttcttccacctccattcgattgcgaggagaggtagctagagggccgcggttccaacatcctgctgctgcagcgcgaactcgaggttccacagcacgtcgcccatggacggccggtccacgccctggtccgccaggcacttctccgccgtctcggcgaacttcttgaggcagtcgggcgcgatcttcccctccagcaccgggtcgatgatctcctccagggtgcccttccgctggcagctcagcgcgtggtccgccaggctcacctgctcccgcggcaggctcgggttcagcgccggccgcccgcacagcacctcgaacagcaccacgccgaacgagtagacgtccgacttctccgtcagcttctgccgccggaagtactccgggtccaggtacccgaagctgcccttcaccatggtgctcacgtgcgtctggttctgcaccgtcggccccgtcttggagagcccgaagtcggacaccttggccacccacttctcgtcgacgaggatgttggtggtcttgacgtcgcggtggatgatggtgtacttggcgcccgtgtgcaggtagtggagcccccgggcggcgccgatccgatctccagccgctgcctccac

SEQ ID NO: 612 - DNA, 757 bp, Triticum aestivum
tgggcctacaacccgagcgccatggacatgagctacgcgctcttcaccgcatccggcaccgtggtccaggacggctcctacgggtaccagaacctgttcgacaccaccgtggacgccttctacacggccatggccaagcacggcggctccaacgtgaagctcgtggtgtcggagagcgggtggccctcaggcggcggcacggcggcgactccggccaacgccaggatctacaaccagtacctcatcaaccacgtcgggcgcggcaccccgcgccacccgggcgccatcgagacctacgtcttctccatgttcaacgagaaccagaaggacagcggcgtggagcagaactggggactcttctaccccaacatgcagcacgtctaccccatcagcttctgatgagctagctgcgtatgcgtagctagtgtccgtatgtccgtacgtacgcgcgcgtacacgcgtataagagcgtgtatgcggtacgtatgtgcacattatgtattgtacagggtttgggttggggtgcgaccgctgaggcagctcagatgcgtacgctatagtagtggtttgctgtagtagtgtatgtgtatgatttacgatggaagggaagcagatgtaaacgctctcccttcgtcgattcatcatacatttgatacgtacacacatgtgtgcgtaagtagaactatattgtagggttcaaaatttcgtcaaaatttgacggaatttgtccaaaataatatgaaatatatcggcgaga

SEQ ID NO: 613 - DNA, 597 bp, Triticum aestivum
gagtccgcggagccgcagtgccggcggtgagaagcaggcccgacgcgcgcctacgtccggacgcgcgcgccatggcggccacccccgccgacgtgaaggagctgccggacgcgtacgccttcgtggtggacatgccggggctcgggtccggcgacatcaaggtgcaggtggaggacgagcgggtgctggtgatcagcggcgagcgccggagggaggagaaggaggacgccaagtacctgcggatggagcgccgcatgggcaagctgatgcgcaagttcgtgctccccgagaacgccgacatggagaagatctccgccgtgtgccgcgacggcgtgctcaccgtctccgtcgagaagctgccgccgccggagcccaagaagcccaagaccatccaggtccaggtcgcctgagatgcgtctgcgtgcgcgtcgaatcgaagcagagtgcgagtgagtagcgagtttcctgtgatgagcgatggtctgtctgtcttttggtttcgtctgctggagggtgtgtgccgtgtcactggtgatggcttgatgtttcgttagtggaaacggggatgttctgcggcttcgcctgaatgaaacatgc

SEQ ID NO: 614 - DNA, 1147 bp, Triticum aestivum
ctcagccctccagcccgacccggtcagtgcgctggtacactacccccacaagctcgaagaagcagcggtactttaacatggctcctctttcgtccaaggccgttgcactcgttgcactgtcctccctcctcgtcacctacgccgccggcgccgggaacttcaacgattccgccttcaccgccgaccccaactgggaggacgccagggccacctggtacggcgcgcccaccggtgccggccccgacgacgacggtggtgcgtgcgggttcaaaaacaccaaccagtaccccttctcctccatgacatcgtgcggcaacgagcccatcttcaaggacggcaagggatgcggctcctgctaccagatacgatgcaccaacgaccagtcctgctccggcaacccggagacggtggtcatcaccgacatgaactactacccggttgccaagtaccacttcgacctgagtggcaccgccttcggcgccatggccaagcccggcctcagcgagaagctccgccactcgggcatcatcgacatccagttcaagagagtgccgtgcgagttccccggtctcaaggtgacgttccacgtggagcaggggtcgaacccggtgtacttcgcggtgctggtggagtacgaggacggcgacggcgacgtggtgcaggtggacctcatggaggccaactccgggacgtggacgccgatgcgcgagtcatgggggtctatctggcggctggactccggccaccgcctccaggcgcccttctccatgcgcatcaccaacgagtccggcaagacgctggtggccgacaaggtcatcccggccaactgggcgcccagcaccttctaccgttccatcgtccagtacagctgaagctgctgaactgaactcatcatttggaatcatgcatgcattggcttgatttggtatttgtactaccatggatcgttttgcatgggtactactgaggaggtttttgattaattaaggttgggtcatcgggtgtcatgtaggcgtcgtcgtgcatgtgtgtcttgaatacgtcggtgggatatggaggaggggcacttttgcatgtgcactcccgcgcccaccgtcactgtaccagtgtgtaagcagaccataagttattactgtttgtgtgtact

SEQ ID NO: 615 - DNA, 1210 bp, Triticum aestivum
aaaaccctagcagcgaaatccactcgatcgaaaaagttcttcgtctccctctcgcggaatccacagcgcagaccggccgatcccccgcggaagagcagcagcagagatggcgcagtccggcaacaacgacgccgccccgatcagcacccagcccgcggcggaggatgtgacggtggagaggacgcccgaggaggaggaggccaggctgaggtacctcgagttcgtgcagcaggcggcggcgcaggcggtcgtgctggccgccgcggcctacgcgtacgccaagcagggcgccggccccctccgccccggcgtcgaccacgtcgaggggaccgtcaaggccgtcgtcggccccgtctacgaccgctaccacgccgtgccgctcgacctcctcaagttcctcgaccgcaaggttgacgagtctgtccaggaactggaccgccgtgttccacccgtcgtgaaggaggtgccgacctatgcccgctctgcagcagctgaggtgcagaagacaggcataatgggcacagcaactggactgggccaagtcggccattgcttgtgctgagcccaaggcccgtgacttgtatacccgctacgagcctgtggcggagcgcaaggctgccgaagcctgggccgccctgaaccgcctcccgctcgtcccctcggtgacccgtgctgtcctccccacagctgcacagctctcagcgaagtacaactctgccgtgcttgatggcgctaagcgtggcaattccgtcgccacctacctgccactcgtcccaacggagcgcattgcaagggtgttcgccaacccgtccgctgatactgcgcctgccacagctcctgagatgcagcccataccgacgcagtaacaataagagctacccgttgttatgttacctaatagctgttaggagtcagtatctcgttgtgtagtgtcttgtttggcttgtggtggaccgtggtattatgtgtggatggtcactgtggtatccgcctgtctggaagcgactctgaatgctgttgctgtgcagcaaagcctgctttgcgttttagtttgttctgcatgaaccactgtgtaatgctttgaatcaaagttgcatgaaacaccatctgtaaattcacattctatttttatgtttgtgtgtattgactgtcaattggcattgtttacaactgctctgcagttatttgcatgtgatgaattgtttataca

SEQ ID NO: 616 - DNA, 687 bp, Triticum aestivum
acaccggcgggtggccgaccgcgcccgacggcccttctcgtggggctactgcttcaagcaggagcgcaacccgccgtccgactactgccagccgaggccggagtggccgtgcgcgcccggcaggcgctactacggccgcggccccatgcagctctccttcaactacaactacggcccggcggggcgcgcgatcggcgtggacctgctgagcaacccggacctggtggcggccgacccggtggtgtcgttcaagacggcgctgtggttctggatgaccccgcaggcgaacaagccgtcgtcgcacgcggtgatcacggggcggtggacgccgacggccgcggacaacgcggccggccgggtgcccgggtacggcgtgatcaccaacatcatcaacggcgggctggagtgcgggcgtgggcaggaccctcgggtggccgacaggatcgggttctacaagcgctactgcgacgtcctcggcgtcggctatgggagcaacctcgactgcaacaaccagaggccgttcaccagcggcgcctcggctgggctcgcggcgcagtgaaaaacgccggcgtgtaccagtgtcagcatgtgattcatgtatgtgtgattccaggagttctcttctctactgtctaaggtgacgagcgtgttgcctcgatccgtgaaagctcgcgcgcgtcagccagc

SEQ ID NO: 617 - DNA, 770 bp, Triticum aestivum
gacgccacggagagccagtacggcgaggtagagcggtacgtcccgaaccactacgacacggtgtcggcggtgctgtcccggttcgcggcgatggggctggacgccgaggccgtggtggcgctgctgggcgcgcactccgtgggccgcgtccactgcagcaacctggtggcgaggctgtacccggcggtggacggcggcatcgagccggcgtacggcgcgtacctgcggggcaggtgcccgacggcggacgcgagggaggacacccgtgacgtggcgtacgcgcgcaacgaccgcgccacgcccatggtgctcgacaacatgtaccacaagaacctgctgaaaggccgggggctgctgctcgtagaccagcggctggcgtccgacccgcgcaccgcgccgttcgtgaggaggatggcggctgacaacgggtacttccgtgagacgttcgcggcggcgctggtgaggatgtcggagaacgggccgctcaccggcgggcagggggaggtcaggagggactgcaggttcgtcaacaccaagtaagagctgagctagtcagcgacgtggcctagtgcccgtggcatggggcactaaaaataattcagaggaagtgatgaagggaccatgcatcatgtgtgcgtgcttggcttgctgtatgagcatgcatgctgcctgcctgtacctacctgatgggtatgcgttatccgaattcgctgtagtttagttttcaacggctgcaacactgaaatctcaaaatggaattctgccgacct

SEQ ID NO: 618 - DNA, 650 bp, Triticum aestivum
  misc_feature (13)..(13): n = any nucleotide
catcatcaacacnttctactccaacaaggagatcttcctccgtgagctcatctccaacgcctccgatgcgttggataaatcaggttttgagagcctgactgacaagagcaagctggatgctcagccagagctgttcatccgtataatccctgacaaggccacgaacacactcacacttattgacagtggtattggtgatgaccaagtcagacctcgtgaacaaccttggtaccattgcgaggtctggcaccaaggatttcatggaggcactggctgctggtgctgatgtatccatgattggtcagtttggtgtcggtttctactctgcttaccttgttgctgagagagtcattgtgaccagcaagcacaacgatgacgagcagtatgtgtgggagtcccaggctggtggttccttcactgtgacacgtgatactactggagagccccttggaaggggtactaagatcaccctctacctcaaggatgatcagttggagtaccttgaggagcgtcgccttaaggatctggtgaagaagcactctgagttcatcagctatcccatctctctctggacggagaagaccactgagaaggaaatttctgacgatgaagatgaggatgagaagaaggatactgaggagggcaaggtt

SEQ ID NO: 619 - DNA, 766 bp, Triticum aestivum
ccggtacggcgaggtggagcggtacgtcccgaaccacaacgacgcggtgtcggcggtgctgtcccggttcgcggccatggggctggacgcggaggccgttgtggcgctgctgggcgcgcactcggtgggccgcgtccactgcaacaacctggtggcgcggctgtacccggcggtggacggcggcatggagccggcgtacggcgcgtacctgcggggccggtgcccgacggcggacgcgagggaggacacccgcgacgtggcgtacgcgcgcaacgaccgcgccacgcccatggtgctcgacaacatgtaccacaagaacctgctgaaaggccggggcctcctgctcgtggaccagcggctcgcctccgacccgcgcaccgcaccgttcgtgaagaagatggcggccgataacgggtactttcgtgagacgttcgcggcggcgctggtgaggatgtcggagaacgggccgctcaccggcgggcagggggaggtcaggaaggactgcaggttcgtcaacgctaagtaagggctggtgatcagtggcaagacgtgatcgtgtgtgtgtgtacgtgctcgtggcgtggggcacgaaaataattcagaggaagtgatgaaggggccacgtatcatgtgtggctgcgtgcatgcttggcttgatgtatgagcatgcatgatgcctgcctgtacccgataaatatgccttatccgaattcgctgtaatagttttcaacgtctgcaacacttattttgatatggaggaaatacg

SEQ ID NO: 620 - DNA, 833 bp, Triticum aestivum
ccggccgcaacggtgcgccgccaagagcttttacacgcgccgttcttttcttgccgcgcccggccaaccccacttcggaaagcagcaccagcgacgacggcagagggagataccgccttcttcgcccacgtcacccacgagaccggacacatgtgctacatcgaggagatcggcggggcgaggcagaactactgcgacaggaagtacacgcagtggccgtgcgcctcggggaaggggtactacgggcgtgggccgctgcagctgacgtggaactacaactacggggcggcggggaagagcgtggggttcgacgggctcaaaaacccggagaaggtggcgcaggacccggaggtggccttcaaggcggcgctctggttctggatgaacaacgtgaagcaggtcctgccgcggggattcggcgcgacgaccagggcgatcaacagcggcgagtgcaacggcgggaacgcggccgccatgaacgcccgggcgggctactacagggcctactgcaggcagttcggcgtcgacccggggagcagcctcacttgctaggtgctttgcgcctgatcgagatgggcatgcagagaacatgcatgacttatgtagaataaacgttcggcatgcgtatacgcgtcttaagccgtccaaacaagaaataaagggtgaggatgtggtctagcacgtaccaagatccttgcagtagtactgctcacagctctactccttttcctcatcaacaagcaaaagtgttactcctatgttcttgtttattactcatgtctaggtacatctgtatctaaaaaaatcatacgagtaattcatgacggaggtaa

SEQ ID NO: 621 - DNA, 1177 bp, Triticum aestivum
atgcgccctcatcacagcacaggccatcacatcttgcctggagttggtgatttggatttgaggaagagattgacaggctcaagcgcgacaagaacctcttgatcacagaggtagtgaagctaaggcaggatcagcaagctactaaggataatgtgcaagccatggaaggcaggctacgagctgctgaacagagacaggcccagatgatggggttcttggcaagagcaatgcgtaacccacacttcttccagcaattagtccagaagcaagataagaggaaggagcttgaagatgccatctcgaagaaaagaaggcggcctatagacaatgctccattttatggttcgggggcaacaacaagtcagagcgagcaacttgattcacagttcctgtttgattctggtgtcctcagtgaacctggaatgaacgggatggagaatttagcgcagaacattcaggagcttgggcagggcaaaacagacgaggagaagaaggatgaagctaatgggcagctggacatcaacagcgatttctgggcagagctattttctgatgattttggagacgaagacgggtctgggctgtcagagttggagggaaggagacctgaagatatcgatgaactgggtcagcagttggggtatctgagttctactagcccgcagtagagttttgttcacagtggttcacttcaaccaacaaacattgcttcttcagtactactattgcagatcatcttgaacaatctgatttagttgattggtggcaacatgactggctatctgaggtgttccataccggggattggaacacctctgggtagggagtagaagctgaagactaattgctgcgtcgcttgatggagacccatgacgtgtattgaatggttacctaaactcgtaactctgaagaagatggtccaggtagtcgacattcggttgttctgagctggtgttcagcagcagtagctgtggaagtgtgttactgtatatactcgttgggtgaagctttgttgtgaaagtctggtctgtagtcagccgttggcatctgggtgtgggttcagtcatttctccttctgccgtccatttgccatttaccttacttttagggcctgtgtcctgtgtgatgattggtagtgtatgctgcacctctgttatattgagataataaatgttga

SEQ ID NO: 622 - DNA, 690 bp, Triticum aestivum
cgcgaccgggccccctacccgcggaccaggtggtgaaggacctgtccggctccttcgccttcgtcgtcttcgacaaccgcggcaggtcggggtcgggggcggcggtgttcgcggcgcagagcacggacggcggggtgccgctgcactggggcgtggcggcggacgggtcggtggtgatctgcgacgaccgcggcgtggccaaggccgggtgcgggcggtcgtacgcgccgttcccgcccgggtgcatgttccacagcgagggcgggctcaagagcttcgagcaccccatgaaccggctcaaggcgttcccgcgcgtggacagcgagggcgtcatgtgcggcgccaacttcaaggtcgacgcattcaccaagatcaactccatgccccgcgtcggcagcgccaccaactgggccgccacctgggacgacgccgccatctagctgggctggtgtgcatcacctcgccggcgccgctcgcctagctcgtcggacttctgaatttgggcttaccgcattttacttactttttttctttggcaatgtacattctgatctgatctgatctgatctgagccgtgtgtgggcgtgggcgcgctgacacgtacggttgtttgcttgtacgatggaggaataagactttgcttccagtccaagagtgctactgagtcgtcacttgttttgagcaaaataa

SEQ ID NO: 623 - DNA, 874 bp, Triticum aestivum
cggatgaaggctttgaagaagatgaagaatggcaaacagggttcctcaaatagcaatttttgtcccatgatcatcaccattatcttctgcctcgtcatactctggcaagggttttgctccaggcaagcatctggagtaagcttccacggatcacctgaatcttcagttagagagcatagcagcctgatctccatccggttctacaagaagaaccattctaacgtcagacctcacggttccacctccgcggctcccaacaactacgagacgcaccaccggggctggagatccgtcccgaggggggaacggccgcggcacgagcacgtcggccgggcatgaccgccggccgtgccaaggcccccgccgacacgccctcccgctcgccgccattttgaaagctcccccacgacaggctggccgatgtaaatccgaggctttgtttagcgcccctcgaggaggcctcgctgtaaatgaaccttctctagcgtgtgttgcgcgctcccccgggttccacgctgctaaccaaccggtggagtggacttcccggcggccatggcggcacctggtaagtcagtcccgagcgcaagctgtatgatgacggtgatggtttcaatcaatcaataatactaataaggcttgctagttggtggtgatgataatagtagtctaatctgatctggtcctgaactgaagccagtgtggctcacactgttgactgttgagggttgagagagtgtcactggctctggggtctgggcggtggcgctgggcggtgtagatccctacgctgtacgtgtacagcacggcggttgcatttgttatttgtgtacatttcaataatggaatgtcaatgatgatggttaagcaagcatca

SEQ ID NO: 624 - DNA, 822 bp, Triticum aestivum
gtcgccgacgagcgcggtggatcgcgctcggcagcgagatgtcgggcggcatccgggacgtgcgcgccgaggacatcacggcgatcgggaccgagtcggcggtgcggatcaagacggccgtgggccgcggcgccacgtgcgcgacgtgtacgcgcgccggatgcggctcgacggcatgaagcgcgtcttctggatgaccggcgactacaagtctcaccccgacgacggctacgacaagaccgccgtgcccgtcgtggagaacatcagttaccaggacgtggtggccaccggcgtgtggaaggaggcggcgaggatgcaaggcatccagggcgcgcccttcaagggcatctgcatggccaacgtcaccgccgagatgaccaaggagaggaaggtgtcgtggaactgtgccgacgtcgagggcgtctcggccggcgtcaccccggcgccatgcgcgccgctgcagggcacccacgccggctcctgcccgttccccaccgacacgctcgccgtcgaccagatcgccgtgcagcagtgctcatactccatcactatccctgctactacttcagtggccgggacagagtagctcaatcatacagtagtatccagcttcttgctgcaccaagtgatgaggttgttggatctctaagtgagaacagtaacaataaggagcgtgttgtcgagtggctgccttggtaactttatagaagtaaaaaaggttgttgtgggtaacttacttactgtttaaatgcatatagagttaagatttagaattgtcactttgttgcaattattagtgtttatgtaggcattgcaaggcag

SEQ ID NO: 625 - DNA, 930 bp, Triticum aestivum
atttgggtgtgttctgatgaaggacttcctgcatgcacttggaacccggctgaagaagaacacagctgcctacgacaactacagtcggatttttgtgcctcagggcgaacccctttcctctgcgcctggagagcctttgagagtgaatgtacttttcaagcatattcagaaaatgctgtctggcgactcagctgttatagcagagactggggactcatggtttaactgccagaagctgaaactgccagaaggctgtgggtatgaatttcagatgcaatatggatcaattggttgggctgtgggtgcaactctgggatatgcgcaggctgctaagggtaagcgagtcatttccttcattggagatggcagctttcaggtgacggcacaagaagtgtcgacgatgctccggtgggaacagaacaacatcatctttctcataaacaacgggggttacaccattgaggtggagatccatgacggcccttacaacgtcatcaagaattggaactacaccggcgtggtggaagcattccataatggcgagggcaagtgctatacggccaaggtccgaacagaggaggaactgaagaaggcaattgaggcatccctaggacccaacaaggacagcctgtgctttatagaggtaattgttgcacaaggatgacactagtaaagagcttcttgagtggggttctagggtttccgccgcgaatagccgcccaccaaatccccagtgacacatcaggtctccacaagatcctcatccagcttaatgatgtcatgtggaagttctgaatagatgttactgttctctgaataaatcatccatttgagtccattgctgttgcaagtgctcatggttactgtacatagatggtcttagttcaggaacctgtgcttgtatattacttcaataaatctgaaatcgat

SEQ ID NO: 626 - DNA, 748 bp, Triticum aestivum
gacccctccttctcccctccccgaaccagaccaagcaagagcaaccatggctccgattggcgtgggcagcaccctccccgacggccagctcgcgtggttcgacgagaacgaccagatgcagcaggtctccatccactcgttggccgccggcaagaaggtcatcctcttcggcgtccccggtgccttcacccccacctgcagcaatcagcatgtaccaggcttcattactcaggccgaggagctcaaagccaagggtgtagatgagatcctgcttgtcagcgttaatgacccctttgtcatgaaagcatgggcgaagacatacccagataacaagcatgtgaagttccttgctgatggagcggctgcatacacaaaagcacttggtcttgagcttgatcttacggagaaaggattgggtcttcgttcgaggcggtttgctctccttgctgacgacctcaaggtcaccgtcgcaaacgtcgaggaaggtggccagttcacaatctctggtgccgaggagatcctcaaggcactgtaggggcttcagcgcttcggaatcgcagcgatcacccaaaccttgtgtcatatcgatgtagtttgaacttgtctgccaaactgctagtgggaataaattgtcgatgtgcatttcttcatgtactttatgtgcggtgcaagtgacttaagagttttccagtcattgttggttgcgttgcaaacattctgagattgttgaaggaaaatggtgtgggtg

SEQ ID NO: 627 - DNA, 763 bp, Triticum aestivum
gctaatcatggcatcttccaagagcagtcttgcaatgttcgcgctggccatagtcatggccgtggtggccggcgtctcggcgcagaacaccccgcaggacttcgtcaacctgcacaaccgcgcccgcgccgtggacggcgtcggccccgtggcatgggacaacaacgtggccaggtttgcgcaggactgggcggcgcagcgcgccggcgattgccggctgcagcactccggcgggccgttcggcgagaacatcttctggggttccgggcagtcgtggacggccgccgacgcggtgaagctgtgggtggacgagaagcagaactaccatcttgacagcaacacctgcgacgccggcaaggtgtgcgggcactacacgcaggtggtgtggcgcaagtcgacccgcatcggctgcgcgcgcgtggtctgcacggggaaccggggcgtcttcatcacctgcaactacaatcccccgggcaacttcaacggcgagcgcccgttcgcgttcctcacccttgacgccgaagcctagtacgtgcgagtgagtgtgatcatacatgcatacgtacgtgcgtgtgtttatgtttgtgtggtttgaatatttatacgtctacaaatgttacgtacgtacgtaaataagcacacattccggcctgcatgtatccatgcggctctgtggagcgtgtaaatgtatgcaaacatctttacttttgttttgttgttccaaacttggacctagcccctaaaaaaaaaaaaaatactccag

SEQ ID NO: 628 - DNA, 671 bp, Triticum aestivum
aaaagtgtcttgtttacgagcttatacgcaatggaagtgtggaatcccatcttcatggtgctgacaaggataagggcatgctgaactgggatgtcaggatgaaaattgctttgggtgctgctagaggcctggcgtacctacatgaagattcaacccacatgtcatacaccgcgacttcaaaggtagcaatatattgctggaggatgatttcactcccaaggttactgattttggtttagcaagggaagcaaccaatggaatcaatcctatttccacaagggtaatggggactttcgggtatgttgctccagagtatgccatgacagggcatcttcttgtcaagagcgatgtctacagttatggggttgtcttgctggagcttttatcaggaaggaagcctgtaggcatgtcggacaacatggatcctgagaaccttgtgacttgggctcgtcctcttctaggcaatagagagggcttggagaggctgatcgacccttctctgaacggcaactacaatttcgacaacgtagccaaagtggcgtccatcgcttcggtgtgcgttcacagcgatccgtcacagaggccattcatgggtgaagtagtccaggcactgaagctgatttacaatgacgcagaggaggccgttggtgattcctacagccacagggagt

SEQ ID NO: 629 - DNA, 882 bp, Triticum aestivum
ggcacaaccgccaacggtggtgggcagtttcgcttggctcctcctgtcttgtagtagtgcgcgtgcacaagaggtcgccatgtacccgaagccggaggatggtccggcgacgggcttcccgatgagcggcggcacgggcgtaggcgttggcggcggcggtggcccgggcgcgtactaccaggcggcgccggcgacagcggcgttcgcgatgcaggcgcaggcgccgctggcggcgtggtcgacggggctgtgcgactgcttcgacgactgcggcaactgctgcatcacgtgcctgtgcccgtgcatcacgttcgggcaggtggcggagatcatcgaccgcgggtcgacgtcgtgcggggcgagcggcgcgctctacgcgctcatcatgctgctcaccggctgccagtgcgtctactcctgcttctaccgctccaagatgcgcgcgcactacggcctgcaggagagcccctgcgccgactgctgcatccactggtgctgcgagccctgcgcgctctgccaggagtaccgcgagctcaagaagaggggcttcgacatgaacctcggatggcacgccaacatggagaggcaaggacgcactccggcgaccatgccacccctcatgcacccagggatgacccgttgatcgatctgtgcttttgttctccaagacacgtctaaagtgtgcgtccttatgtagtagaagaagtaatctccatgctattcggcgtctttgcggtgccggtgttacctactttgcaggtttctgtacaatactgtgtaacacacgactactactttgtgtaatgttactgcaaacgtattttcccttttttatctagaatatgcatgagtatgcgtattttttatattaagaggagaaga

SEQ ID NO: 630 - DNA, 695 bp, Triticum aestivum
ctcgacccgggcattcgtgcagctcaacatgcccgccggcaccgcgggcgccagggtgtggccgcgccactgggtgcaccttcgacggcagcggccgtggcggtgcatcacgggcgactgcggcggcgcgctggcctgcagcgtgtccggccagcagcccaccacgctggccgagtacaccctgggccagggcgggaacaaggacttcttcgacctgtccgtcatcgacgggttcaacgtgccgatgagcttcgagcccgtcggcgcgtcttgccgcgccgcgcgctgcgccacggacatcaccaaggagtgcctcaaggagctgcaggtgcccggagggtgcgcgagcgcgtgcggcaagttcggcggcgacacctactgctgccggggccagttcgagcacaactgcccaccgaccaactactcgaagttcttcaagggcaagtgccccgacgcctacagctacgccaaggacgaccagaccagcaccttcacctgccccgccggaaccaactaccagatcgtcctctgcccttagattaggacgcgttgaaggatcaaaagtatatataatagctgggatcaataaggaacaaggactactctgagtagtctacttatatgtatgtgccatgtcacatacatgcatatgcacgactgtgcctgtatgttgaccaataataaataaatggtta

SEQ ID NO: 631 - DNA, 869 bp, Triticum aestivum
  misc_feature (21)..(21): n = any nucleotide
tgaagaagaaggctatgagtncatctacatgtttgacgccattgatgagtatgccattggtcagctcaaggagtttgagggcaagaagcttgtctctgccaccaaggagggtctgaagcttgatgagagcgaggacgagaagaagaagcaggaggagctcaaggagaagtttgaggggctgtgcaaggtcatcaaggaggtgctgggcgacaaggttgagaaggttatcgtctctgaccgtgtggtggactccccttgctgtctggtgactggcgaatatgggtggaccgccaacatggagaggatcatgaaggcccaggccttaagggactcgagcatggctggctacatgtcgagcaagaagaccatggagatcaaccctgagaacgccatcatggacgagctccgtaagcgtgccgatgccgacaagaacgacaagtctgtcaaggacctcgtgatgctgctcttcgagacctccctgctcacctccggcttcagcctggaggaccccaacaccttcggcaccaggatccaccgcatgctcaagcttggcctgagcattgatgaggatgacgaggcgccagagaacgacaccgacatgccgcccctggaggacgacgccggcgagagcaagatggaggaggtcgactaagcgccaaggctgcctgtcggctgtcgtcgtcagatgtccatgccctgcaccgcctagttgtttttatcttagtgtcgacgttggatggttttggcacgttttagctgtatcggttttgtcttttggctggccaaacattaagcgcggttagctgtttgtggtactcgtggaacagttcgttattgttggttctacaatatgtgttagttattatatt

SEQ ID NO: 632 - DNA, 1397 bp, Triticum aestivum
  misc_feature (181)..(181): n = any nucleotide
  misc_feature (205)..(206): n = any nucleotide
  misc_feature (220)..(220): n = any nucleotide
  misc_feature (246)..(246): n = any nucleotide
  misc_feature (323)..(323): n = any nucleotide
  misc_feature (351)..(380): n = any nucleotide
aaaaatttccccaacctcgctcgcttctcctcctcaattggggagggagggaggctccaatccaatccaatccaatccaatccaaaatcgaatcgaatcccactggattggagccagccagcgagatacgactcagatccgtgtcgtccgcgcgcgcgcgcatgaagacgaagctgctctnactctccgttggtggcgttgagcnntagccacgactctngcctccgtgctgcttcgctgcccgangtagcaggagccgggcagggagggaggaagatgcgcatgcgggtgctgccggcgttcaccttcagctccagcaccgncgccgccccgccgccgccgacttcggannnnnnnnnnnnnnnnnnnnnnnnnnnnnnggcggcagcaccggcggactacgcggtgtacctcaacatctacgacatctcccccatcaacaactacctctactggttcggcctcggcatcttccactccgccgttgaagtgcatggtatggagtttgggtatggagcccatgaatacgcgaccagcggagtgttccaagtagaaccgaaaagctgtcctggctttatcttcaggcgctccgtgtgtatgggtaccaccaatatgtcgcgcgctgaagtccgcgctttcctagaggatcttgcagaggattatcatggggacacctatcacttgattgtcaagaactgcaaccatttcacagctgacgtctgtaagcgcttgaccggaaagcccactccaggatgggtgaatcgacttgccagattaggttccgtctgcaactgtgtcctgcctgaaaacatcaaggtttcagcggtcagagatgaaactgcacaccttgaattttccgatgatgatttggagtcggacacgtcgatgatcgacgacagcgacatcggtgatctagatcacctcctaacaacaccaacagcgatgtcgtacccccgaaagacaagacgttaactcctggaagggacagcttgtaattgtttcaggttatttatgcacagcattacctgcttccgggttgtttgctgaggatgggagatcttagccgtggcgctgatgtcctcttgccaatggcggtggcagatcctgatactgatccgtttgaagttgctgctatatatatgttgatgtagagagcgggggtagcgagtgtggtttgtctaatcgtggcgaaggccaagttaaccaacacgtgtgagatggctgcgtgcatagttgattgtaacttttaattgtttttgagagtagggtgttgcaggtgtatagtgcttgtgtaactagctgttgggtttattttatggtgattgacaattgttttgttgtgtaagtacagaatggcttgacttgatgttgttttcctcaccgaaattaatgcggca

SEQ ID NO: 633 - DNA, 655 bp, Triticum aestivum
aagcgggaaggaaagaagggagggaggaagccatgtctgcccgcggagggagccgtcgtcttcagcgaggagaaggaggcgctggtgctcaagtcatgggccatcatgaagaaggattccgccaacctcgggctccgcttcttcctcaagatctttgagatcgcgccgtccgcgaggcagatgttcccgttcctgcgcgactccgacgtgccgctggaaaccaaccccaagctcaagacccacgccgtgtccgtcttcgtcatgacgtgtgaggcggcagcccagctgcggaaagccgggaagatcaccgtgagggagaccaccctgaagaggctgggcgggacgcacttgaaatacggcgtggcagatggccactttgaggtgacgcggttcgctctgctcgagacgatcaaggaggcgcttccggcggacatgtgggggcccgagatgaggaacgcgtggggcgaagcctacgaccaactggtcgcggccatcaagcaagagatgaagccctctgaatagctcatccattgtactcatatgccacaccacttccgtctattatccctccaacttttgttgcctggccggttcactcatgtcaccatattgtatttgtattgtgtgtttatgtgtacgacgctatgtaaaatga

SEQ ID NO: 634 - DNA, 713 bp, Triticum aestivum
ggctggagtacctgcacgtgctcagcacccgcagatcatccccccgacctgaagccgcccaacatcctgctggacgacgacatggaggcccgcatccggacttcggctggcccaaggcgatgccggacgcgcacacccacgtgtcgacgtcgcacgtagcaggcaccatgggttacatcgcgccggagtaccaccagtcgctcaagttcacggccaagtgcgacatctacagcttcggggtgatcctggcggtgctggcgacggggaaggagccgacggaccagttcttcgtgacggaggtggaggaggtcgggctggtcaagtggctgcgccgggtggtgcagaacggcgactacgcggaggccatcgaccccgccatcgccggggccgggcacgaggagcagatcatgctggtgctgcgcatcgccgtgttctgcaccgccgacgaagccaaggagcggcccgaggccaaggacgtgcgctgcatgctcgcccagatcaagaactagtagtctagtcaccgtataggcgcgagccaaagctccgtgtttaaagtattggtcgtcgtgtcgtgtcttcactgggtatgatgatacaatggcagtgactgtgtgtagaataatgctgcaagtgctgggtcagcgggtcaagtacggggccggtcgaccgataaagaccgggaaggagatcattattgtacacaagttcatcta

SEQ ID NO: 635 - DNA, 423 bp, Triticum aestivum
ggaagagcacgtcgagtcagccagcagcgagcatatatacatacgcgtgcgaagtgcagtgaaggcaggcaggatgtcgggggcacagggagcgcacccggtcggggagacgacgccgacgacgtacgggtcggtgggcggcggggagaaccgcacgcgcacggacctgcggtcgcgggaggaccagggcaacatccagatcgataaggtgcaggacaaggtggaggacgccgcgtcgcgcaaggtcgacgacagcgccttcgccgccaggaaggaaccgggccaggccggcgacgccggggcgaccggcaccggcgcgtgatctgggttctctgtggcaccctgccgcgcgcgggtgcgttgtgttgtgtagcgagttgtgttctgtaaaagagtctctgcgtgcgagctcacaataataag

SEQ ID NO: 636 - DNA, 677 bp, Triticum aestivum
gccgccgggggacaaccccccggtcacgtacccgtcgcctccggtgaacacgccatgccctcctccgcctccgcgacgcccgcggcgcagacgtgcccggtggactcgctgaagatcggcgcgtgcgtggacctgctgggcgggctggtgcacgtgggcctcggcgacccggtggtgaacaagtgctgcccgctgctggaggggctggtggagctggaggcggcggtgtgcctctgcaccaccatccggctcaagctcctcaacatcaacctcgtcctgcccctcgccctccagctcctcctcacctgcggcaagacccctccccccggctacacctgctccatctgatcgagctaagctcggtaagtcggtgcacgtggagatggtggatcatggatggatcgacatgagaggatgtcgaacgtggtcgtagtacgtagcgagcaagaagaagagattgatcgatcagctatgaagggatcgatgagtacgcgtttgtttttcttcatttcttgtggtttcctttttgtgtttggttattaggtcaggtctgtgtgctctggtttggccgatgcaagaggtgataatcggtgtgtttactgattaattaattgtgtggtcacagactcacagctgatggccaattggttaagctagcagacacctagtactatcag

SEQ ID NO: 637 - DNA, 1442 bp, Triticum aestivum
gcccggacctgttcccggtgtctgagcctggggtggaggtggggctcccggcgagcggcgccggggcgaggcacgtgctcaagatgagcgtcatggacacggtccaggactactacgtggtcgggcggtacgacgacaaggcggacaccttcgtgccggaggacgacgacgactgccggagctggcgccgcctcgactacggccacgtgtacgcgtccaagtccttcttcgaccccagcaagaaccggcgcgtgctctggggctgggccaacgagtccgacagcgtggccgacgacctcgtcaggggatggtccggtgttcagactgttccgaggaagatatggctggacgaagacggcaagcagctgcggcagtggccggtcgaggagatcgagacgctgaggagcaagcgagtgaacctgctgataccggaggtgaacgccggcggcgtgaacgagatcatcggcatcgtgggcgagcaggcggacgtggaggtcgtgttcgagatcccggccctggagcacgccgacgtcctggagcccaactggctgctggacccgcagagcctgtgcggggagaagggcgcgtccgtgccgggcagcgtcggcccgttcgggctgctcgtcatggcctccggcgacatgcaggagcacaccgccgtcttcttcagggtgttcaggcagaacgacaagtacaaggtcctcatgtgcacggacctctcaaggtcgagcaccagggacggcgtgtacaagccgccgtacggggccttcgtgaacatggacatcgaggcgcacggcgggatcatctccctcagaacgctggtcgaccactcggtggtggagagcttcggcggcgggggcagggcgtgcatcacggcgagggtgtacccggaccacgtcgtgaacggcaacagccacctgtacgtgttcaacaacggcaccggcgccgtcaaggtgtccagcctcgacgcgtgggagatggccacggcgaccgtgaacgtgctccccgacgggctgatcgcggcgagctcggtgagcagggctcaggcctattaggatccgggagctgggttttcgctcggtggacggacggacggatggatggccattgtgaatttgtacggccgattggatttgcctgcccaattgtggttcaggtgtacagatggaggctccctcattgtttgccggaacagcacggaagaaggattctaggatgctgcaaaggagaaagattctactaggaagatttgtgtctaggtgttgaagtttttgatagtgttaataatagtagtagtaagtagcacgcatgccctgcatgttgggtatttggcatcaaattaagagtgtatttccaaggtgaaaacgggtgtcgtgtaaatgtatgatacccgttgagttgtaaaaaacaatattcaaatatacaggtttattcttatgaaa

SEQ ID NO: 638 - DNA, 951 bp, Triticum aestivum
  misc_feature (484)..(502): n = any nucleotide
  misc_feature (627)..(655): n = any nucleotide
gccggcctctacagcctccccaccacccccatgggcactcagaccagcgcctccagcttcatggccaacctggagccactgaacctccgcttcatcgacgacgaggagccggtccagagggtggagtccgggagggcgctccgggagaaagtgttcgagcggctgagccgagacggtgccgcgccccgcagctgcgaggtcgtcggcgccggagcaggcggccccgacgtcggctgggtctccgacctgatcaactgaggcaagccgccgttcttgcaagttcattttgcgacgaggcgctcaacaagattccacggcggaggtggcggtaagaagagaagaaaaatggccccccaaaaaaatacccccgagtttcttttgctactatttccagttgctgcaaattcctgtacatagctgctatctatctcccatgtgaatattcccggttggttggcggaagggaggcaagatgaagatgaannnnnnnnnnnnnnnnnnnttgttttggggttcttgaggaagtgtaggaatttacccaaaaaaatgttaccaaaaaaaggagggaagagatggattggaacttggaaggcggcggtggtccgtcctctctgtggataggtgctnnnnnnnnnnnnnnnnnnnnnnnnnnnnntgaagatgaggttggaaggtggacttgattcctgtgattaccggtgctgatgtttgtttatcgtcgtctgaagaccgatttcaaccgccctctagttgatttcacattttgttaattattaatgtaatctccttcgtaaggatgatgatcccccacagcatattttgtaccttagctgcttagcagcctttaatccctgttcatccaatggcgatgaacgaactccccaatgtatttgtgtaatccttctattatcaagtaaatgatgtttatctatacctatatatcagtaaagt

SEQ ID NO: 639 - DNA, 940 bp, Triticum aestivum
gccggcgctcctctttctgaaccccgaggaacggcgacggtgcaagccttccagacatgtgtgtcaacgggaataacctaattcttatcaagagagaacagagcaatgcaggctgcaacttttggaccaatgcctggcagggtacaaagaccatcgattacctccggaagttcccggtcacgcaataaggcaagccattttgcgcctccaccaggcgcggaacctcaacaaggccctggcagcagccggtctcggcgacgccatcaaggtgtccacggcggtgaggttcgacgtgctcagtaactcctacccaccctccgccgccgtgttcgctcacccatacatggtcgacatcgcccggcacctggccagcaccagcgcgccgctgctcgccaacgtgtacccgtacttcgcctacagcagcaacccgagggacatcaaactcaactacgcgacgttccagccgggcgcgacgcccgtgggggacgcccgcaccgggctcgtctacacgaacctcttcagcgccatggtcgacgccatgtacgccgcgctggagaaggccggggcgccgggcgtgagggtggtggtgtcggagagcgggtggccgtccgccggtgggctcggggcgacgccggagaacgcgcgggcgtacaaccagggcctcatcaaccacgtggcgcacggcacgcccaagaagcctgggccattggaggcgtacgtgttcgccatgttcaacgagaaccagaagcccggggcggagacagagaggcactttgggctcttctaccccaacaaaacgcccgtgtaccccatcaatttcgcaggaggaaggtcggcggcggccaaccacaccaactcgcatgggttcggtggacactagattgatgcatgtaaattttctaacaaaataatatcctcgcagagagaataaaaaatagta

SEQ ID NO: 640 - DNA, 1105 bp, Triticum aestivum
  misc_feature (730)..(752): n = any nucleotide
gcgcgtttcgcgcggagctcccagcaatgtgtcgctggcgtcgctggtgaggagcgggagcgtgcgggagcagcgggagtagcgggagcatccgcgggaggggcgggagccggaggatggtgcgccgggtgctccgcggcgtcatcaccgttcatcttcgccatcgccggcctgttcctgggagccgtcacgggcgggctgatcggcctggccacggagagcggcctcttccgcggcaccggcatcggcgccatcaccggcgcgctcgtgtccatcgaggtcgtcgactcctccatccgcctctggcgctcccgccggtccgggatctggagcatcctgtacgtgcttaatgtgatctacagcctcctgacgggccggctcgtccgtgagaaggttgatccggcaggtgcagcgggtggtccgcagccagatgaatgcagtggactcatcgcagttcagggaggcccctgacctcttcgagatcgagggaaccaacggcatgccgagggcgtccatcgagaaactgcccgagggcactatcaccgaggagtataaccggaatgccgtcggtgacctctacgggtgctcagtatgcctgcaggatttccagattggtgagaaggtgcggagcctgcccgattgcctgcacgtgttccacgtgccgtgcatcgacggctggctgatcaagcacggatcatgcccactctgcaggaggaagctctagatcacnnnnnnnnnnnnnnnnnnnnnnncacgaccgacgacgacgaccgatgaggaacttctgaaattctgtctgctgctattaggaaggaggtcttgctctgcttgctgctttgcatgctgtgtgtgcgcgcgctatgcctgtgttgctgttgctgctgttaggaggctgacatatctatagaacgaaccctaaatttatagagctcttcttttttttgcctttgcattttgatttttgatctctctcttctcctggtggatgtaatatagtagtacgtacgaccaccggggaaaaaaaagcactggaccggcttgcgcttcgttgttgttctccggactgatgaactcctcatatcatcatgtaatgttatatatatca

SEQ ID NO: 641 - DNA, 661 bp, Triticum aestivum
cctgaagctcccccggcaacggcaaggaaggtgtgggtcttcgacgtcgacgagaccacgctctccaacctcccctactacgccactcacggcttcggggctacgccgtacaactggacgagcttccaagagtacgcacggcaggcgagcgcacctgccctgccagagacgaagcggctgtacaacaagttgcttttagtgggcatcaagcctgtgatcctcactggccggcgagaggcccagaggaccgccactgtcacaaacctccgccagcaggggttttctgggtcgatggcggtgctgctgaagccagcggagttcaagggctcctcggtgaccttcaagtccggtgagagacaaaagctgttggacgctgggtatgtcatcgtcggcaacatcggtgaccagtggagcgacatcctcggcacgccagagggcgcccgcacctttaagctgcccgaccccatgtactacatcggctagggctaggccgcctccggatctcatgtgtcgtcgtcgatttctcgaataagttacatgcatgctctccgttacatgcaatgcatgcttcgtcaataatccctcacttgtggctgcttgcttcatttccacatatatacttgatcacttgttgtattaataagatgtattatgaagaagt

SEQ ID NO: 642 - DNA, 762 bp, Triticum aestivum
ctggtactgctacgctagcgtgcgacagcgcgtggagaagccccggcgcgcggggtcgacctcgtcgtggtgaacccagtgctggtggtggggccgctgctgcagccgacggtgaacgccagcgccgcgcacatcctcaagtacctcgacggctccgccaagaagtacgccaacgcggtgcaggcgtacgtggacgtgcgcgacgtcgccgccgcgcacgtccgggtcttcgaggcgcccggggcctccggccgccacctctgcgccgagcgcgtcctgcaccgcgaggacgtcgtccacatcctcggcaagctcttccccgagtaccccgtcccaacaaggtgctctgacgaggtgaacccacggaagcagccttacaagatgtccaaccagaagctgcaggaccttggcctccagttcacccctgtcaacgactccctgtacgagacggtgaagagcctccaggagaaggggcacctcccggcgccgaggaaagatatcatcctcccagcagagctggacggtgcaacggcgtgatggtgctgaagaaacagcgcggttcacgtttttctgtaacgcggtgggacatcatatgtggtctgcttgtgtatacatcctatctaatatcgtgttatttatgtggactaagcaaacatggtaatgtatcggcttcgatgatcaacacttaaaagtgagctttcgcaaactattccttgggtttgctgccagccttcccttctttataagatgcaatgcggctta

SEQ ID NO: 643 - DNA, 850 bp, Triticum aestivum
cgtcggcgccgacctctcggcgttctaccgctgcagctttcgtgggctaccaggacaccctctacgtgcactcgctccggcagttcttccgcgagtgcgacatctacggcaccatcgacttcgtcttcggcaactccgccgccgtgctccagagctgcaacctctacgcgcgccggcccctccctaaccagagcaacatctacacggcgcagggccggacggaccccaaccagaacaccggcatctccgtccagaagagcaaggtggccgccgcctccgacctcgccgccgtgcagtccagcttcaagacctacctgggccggccgtggaagcagtactcgcgcaccgtcttcatccagtcggagctcgacagcgtcgtcgaccccgccggctggctcgcgtgggacggcaccttcgcgctcgacacgctatactacgccgagtaccagaacacggggcccggcgccggcacgtccggccgggtgtcgtggatggggtaccgtggcatcattagcgcgtctgaggccagcaccttcacggtggggtccttcatcgacggcgacgtctggctcgccggcacgtccatcccattctccggcgggttgtgaccgaccaattctatcacaaagcacccagtcttgtacgtgttcgaatacatcgaattattaccccagtggagggacgcctgcctgattcttctattagttttgtggcattttttcaccgcaataagttttgtggcttatgtgtttggttattgtttatgtggtttggttaactagccaagtgcctcgggcaattgtgcgggaaatgtcacccttctgtactattttagttttgacacgtataa

SEQ ID NO: 644 - DNA, 729 bp, Triticum aestivum
  misc_feature (570)..(587): n = any nucleotide
taccgcgccaaggacagcccatactgcagcctgctggtggggctggtgagcgcgtaccggtacgaagggcccaaggtgagcgacgacacggccaaaggcggaggccaaggcgctggggcgcggcggtgaagagcgccgccggcggcaagctggtggagaacgacgaggtggtcaggatcctcaccaccaggagcaagcctcacctcgtccagaccttcaagtactacaaggagctgcacggcaagcacatcgaggaggatcttggaagcgaggaggctctgagggaggccgtgcagtgcctggcgacgccggagaggtacttcagccaggtgatggcggcggcgctgagggagggcgcggaccaccacggcaaggaggccctggcgcgggtggcggtgacgcggtcggacgtggacatggacggcatccgggcggcctaccaggagcagttcggggccaagctcgaggacgccgtcgccggcagcgcgcacgggcacttcagggacgcgctcgtctcgctcatcgtcggcaagtaaaccatatatacagtattgcagacgcggcgggggnnnnnnnnnnnnnnnnnncggcggcgatggcgcgccggctgtgcgtgtgtttttcttcctggttcatctcgtgtcgtgtgtgtgttgaattgttgtcgagcggggcatgtaaacatttgcagctgaggtcgtgtacggctgatcggggatcaaataaaat

SEQ ID NO: 645 - DNA, 741 bp, Triticum aestivum
gcgcgccgatggcgctcgctgcttcgctcctgccccgccccttcgcccccacgacctcctcccaaggacgccccccctcgtcctcgagccgcacgacaccgtctcggcgatcccgttgacgccgccgccaatggcttcgccgccggcgacctggaggggcgcctgaaggatgccgcggaggcggcggcgcgcgcggcgcacgcgccgtacagcgggtgcccgtcggggttcgcggtggcggacggtgaagggaaggtgtacgccgggggctgcctggagtccgcggcgtacaacccgacgctgggccccgtgcagacggccatcattgcgatgattgccgcctccggcggctccgccggcgatgtggtggcggcagcgctggtagagaaggagggggcggtggcggcgcaggaggcgacggccagggtcttcctggccgctgtggcgccgcaggcgagcttccacgtgtacaagtacaggtcgtccgatgtgtgatgcgcagcagcaggcgagatcggacgagataatgttcataatcttcaagaaagaataatatgacgggaaataatcttgtgcagatgggtgagctgtaaattccacatggcgctcgtgattcgctgatgggacaccgagagccggggcctacttaccattcttgtgttcatgtgtgtattattatgaggaaaatataatactcctagaagtaaaaattctctgaacggtgccgtaataaataggtgg

SEQ ID NO: 646 - DNA, 754 bp, Triticum aestivum
atctgagagcgcacgcgagtggtcagagagtgcacgcgcgcggtccgcgtgcggatcgggaggagcggatcagcgggcgcgcgcggtgccccatcgacacgctgaagctgggggtgtgcgccaacgtgctcaacgggctgatcaacctgcagctggggacgccgccgaagcagccgtgctgctcgctaatccaggggctcgccgacctggaggcggcggtgtgcctctgcacggcgctcaaggccaacatcctgggcatcaacctcaacgtgcccatcgacctcagcctcctcgtcaactactgcggcaagaacgtcccctccggcttccagtgcccccgctagaagagaagacccgagagatccatcgtccactgcatgcaggcatccactatacgtacgtacgtgcatgcacgcacgcatgatctacaatccatccattgactagtgctctatagctagtcgtatacgttatttgcttcataatttatcatcgctcttgctagttgctaaacttgcatatttctctctgtgtgtgtggtagtaccgtttgtaccacgtactgcttgtcatcgaactggttacggtactctatggaccatggatccagttctcagccacatatgatctcatgcgtgtaccgctggctgctattatatttccttcaaaaagaggttgctcctccacaattgtagtaaagtaattaatatcatatgtcaactgtctctgtgtgatctttagcatttgctaattga

SEQ ID NO: 647 - DNA, 679 bp, Triticum aestivum
tctcccccatgtcgacccggagctggaggcgctcgaccaggccggccccgcgctccccacccgcggcaacgacgagttcaagcccttcatccgccgcctccccgagttcaagttctggtatgccatcacaaaagccttctgtgttgcttttgtcatgacattcttctccgtatttgatgttcctgtcttctggccaatactactctgctattggattgtgctctttgtcctgacaatgaagcgccagattttacatatggtcaaatacaagtatgtcccattcagcatggggaagcagaagtacggaggaaagaaaggcccatcaaccagcggatccaaagattgaggcgcggatgccaaatccctgtgtcgctcttctgtgaggcgacggataatcagatgatggtgctggcatggtggttttattagtacaacctactgacagtgaatgtacaaactagtaactctttcattggttggtgataccttgttctgcgtagtagatcagtagtagcttccgtacgctggtcatttgtcacgtgttctgttgtagtactgtgagagtgtgcaatgcaaatcaaaaccattgggactcgtgcaactctttgttgctaccacctactccatttcctggaggatctctgcaatttgcttctgcaacacttcgctctcagtgact

SEQ ID NO: 648 - DNA, 778 bp, Triticum aestivum
tcgaggtccccgtgtgcggctagctagatcggtggcgcctcccctccctcctcccccgcggaaggcgcttcccccccttcattcccggaaccgattcttgcaagggattcctcgctgctcggctcttcttgaggcatgcagagccagatcgtgtgccatgggtgcaggagcgttctactctaccccagaggggccccgagcgtgtgctgcgccgtgtgccatgccgtcaccaacgctccccctccaggaatggagatggctcagcttatatgcgtcggctgtcgaactttattgatgtatactcgcaatgcaactactgtcagatgctcatgttgtgatacagtcaaccttgccagaccagcaccgccagtgaatagtatagctcatgtgaactgtggccagtgccagacggtgttaatgtatccatacggagcatcttctgtcaaatgtgctatctgcaattttattacaaacattggaatgaacaccgtgagacctttgccacctacaatgcatgcaccaaacggaatttcatatagtgtcccatcaacttctgcgccatccactcagtcgcagaatgtaacggtggtcgtcgaaaacccaatgacagtagatgacaagggaaaactggtgagcaacgtcgtagtcggggttacgtccggcgggaaaaagtagcgaaacatgtcagcatttgtaccaagtgcggccctgttctatgtcttataatctggggttgggaagactttgtattatactcctgtctggtgatcgaccgatc

SEQ ID NO: 649 - DNA, 666 bp, Triticum aestivum
gtcaggaaggagcatgccgacaacgagggcagttcaggtggcaccggcggctgcgggaagcccgtgcgcgagccgaggcttgtggtgcagacgctgagcgatatagacatactcgacgacggcttccggtggaggaagtacgggcagaaggttgtcaagggcaatcccaaccccaggagctactacaagtgcacaacggtgggttgcccggtgcgcaagcatgtggagcgggcctcgcacgacaaccgcgcggtgatcaccacctacgagggtaagcacagccacgacgtgccggtcggccggggccgcgcgctgccggcgacatcttcctccgacagctcgggcgtcatctggcctgccgccgtgccggccccgtacaccctcgagatgctcaccaaccctgccgccggacaccgaggctacgcggccggcggcgccttccagcgcaccaaggacgagccccgggacgacatgttcgtcgagtcgctcctctgctagctaggcaggctcggccgcggctcttggttcccatgtggcgtttacatgtgcgtccacctgtacaatataatagatacaacatgttttttagctgatgctttttcttgctgttgagtaaataagcaattgtttgattcatttaatgtaggaatactcgataaagcatga

SEQ ID NO: 650 - DNA, 623 bp, Triticum aestivum
ccctcatgtccccgcccaccacgatcggcgaccatccatgctcacccgactggggctcccccagcgcggcggcaacctcgactggggctcacccggcggcaagctggactggggcgtccagggagacgagctgcacaagttccgcaagtcggcgtccttcgggttccgcgggcagtccgccatgccggcggccgccccggccaccccggccgaacccgacgtctcatgggtgaactctcttgtcaaggatggccacacagacgaccattttccgcagtggctggagcaggagcagatggtggcctgatcccaccccggcgacgatcgatcgatcactggctcatagcatctagctgaccaaagttctttccttcaattttttcacccctttttatttgcttaatttgattcatatgagacggttctttagtacgtacatatatgctgttcacaaaaataatattgctgctcatcagcaatcagcatggatgcccaaagggagccttaggttgatgaagaaagaacagccaatattttacttctttttccccttcccttcggtttattataaatagctgtatacaagaattccatcaagagtttatttacttgatatttataca

SEQ ID NO: 651 - DNA, 754 bp, Triticum aestivum
tggtgtcacgaatataggaactgaaggcgaaggttgagacatacagaaatgtcaaagcatctgatgggagagatcttgaatctttgaatctcaaggagttgcagcaactggagcagcagctggaaagctcactgaacatatcagatccaggaagaaccaacttatgcacgaatccatttctgagcttcagaagaaggagaggtcactgcaggaggagaataaagttctccagaaggaactcgtcgagaagcagaaggcccaggcggcgcaacaagatcagactcagcctcaaacaagctcttcttcttcttccttcatgatgagggatgctccccctgccgcagctaccagcattcatccagcggcggcaggcgagagggcaggggatgcggcagtgcagccgcaggccccaccccggacggggcttccactgtggatggtgagccacatcaacggctgaagggcttccagcccatataagcgtactattcagtagagagtaacaagttgcaccggccagtctggtgtatgttgcggttgctagcacgcctgaccccttggaggggaaaggaaaagaaatcagagtaaagtagcaagctgcagcgatgtgtatatttcactttgtccaccccagtttccctcccagctgggctcaatttaccatgtaatctatatgtagcttgagtgatgaattttcaagtttccatgatacccgtctctagtgggatgttgtttatgtgaattcacctatcaa

SEQ ID NO: 652 - DNA, 852 bp, Triticum aestivum
ggcggcaagtacggcgggaagaacatcgccttccatgtgaacgaggggtcgacgagcttctggctctcgctgctcgtcgagttcgaggacggcgagggcgacattggctccatgcagctgaagcaggcgaactcggcgaagtggctggacatgaagcacgtgtggggtgccacgtggtgcctctacggcgggcccacggcgggacccttctccgtgaggctgacgacgctgtccgcccccaagacgctcacggcccgcgacgtcatccccaggaactggacacccaagggcacctactcctcccgcctcaacttcgacgcctcgctctgatggcggaagggccgggccacgttttatcggcctgggatggagcgaaggcaggcccacatggcgttctctttggaattggacgtacgtagattgtgttttgttgcagcttaatcggtctgttgatcgcctagtcgtaagctagtgtggtgtggcgtgagtagtttcggatgaggaggtgagtgatctgggtgcggagcagccgtcctctccaaaagggagagagagcgtatgctgctgggaatccgatgcggaagccgactgggagggttttggacccctctgggtcgccgcttcactcctgctgtcgtgtgctgtttttatcttttcttgtctgttttgtttgcgtgtttgtttgccctggttggttgaattgaagggctcgtgacaaatgtgtttagttacttcgaatggcgggcttgtaccgaggtcaggattcctgcttgttcgcatttccctcttcttattatggacatgtgtgttcgtttggagtactcagagaagacacccttcgtgtgaatgtta

SEQ ID NO: 653 - DNA, 928 bp, Triticum aestivum
cttgtgcctctgcagttgagcaggaaatccaccatgcgcttctttctgtttcccaaggttcaggcatccggtcaatccccaaatgataccccggtttatcttaatgtgtatgatttgacacccatgaatggctacatatattgggcaggccttggtatatttcactctgggattgaagttcatggcgtcgaatatgcatttggagcacatgattatcccacaagcggggtatttgaggtagaacctcgtcaatgccctggtttcagattcaggaggtcaatatttcttggtacgacgtgcttagatcccatccaagttaggcagttcatggagctgcagtcagtaaactacaatggagattcttaccatcttatcatgaagaattgcaaccacttttgcaaggatatgtgttacaaattgaccggcagcaaaattccaaaatgggtgaatcggctcgccagaataggtgccatctgcaactgcctcctcccggagtctctcaagatttccccggtcggccatgatccaaacagccagcccgaggattcagagaagcgccgcctgcgaaacccgttaagctgcttctcctccatctcgagccagagagcgcttcccccgtcttcttcccctttccctccatcgcccgtgaaagagcccattctgagctcttcattgaggaaatccagcaccgcgtcgctcaagagtaggtagcctgcgtaacttttgagaccaagttggctaattcaggcagcggcggcgcatctggacggtgccagttaatttttctccttctctctctcggtgtcagcctaatgcttgcttgttgatgttgttgtttgttgtatcatgtgatgtaatccccgtgaaaagagtggctaaagacagatgtgatttgggtgaacgaattcacctcgattccacccgctcc

SEQ ID NO: 654 - DNA, 716 bp, Triticum aestivum
cggttggcgcaggccggcgggccgtcgacgcggtggagctggggcggctggacgggctgagctcgacggcgagcagcgtccccggcaagcggccccgccaacgtccagcctcgaccagctcacggcgctcttcgccaccaacgggctctcgcagaccgacatgatcgcactctccggagggcacacggtggggctggctcactgccgcacgttcgccgggcgactgcggccgacaaccgacccgacgctgagcccgcggttcgcagcacagctgcaggcgtggtgcccacccaacgtggacccacggaccgccgtgcccatggacacagtgacgccgcgggcatttgacaaccagtacttcaagaatcttcaagggggaatgggcctactgagctcggaccagctactgttcaccgactcgaggtccaggcccaccgttgacgcgtgggcccggagcggtgccgcgttcgaccgggccttcgtggcggccataacaaagctgggccgcgtgggagtcaagaccgatgcgtcccaggggaacatacgccacgactgtgcagccttcaactgatttcaactgctagtgctttgccattgtccacaaaggaatgagaaataccagtatgtactacgtataaaaattgttattcaagggaaatatatcctaattgtttatgatggtgcccgttcagttggtaatcgacaggttgttctta

SEQ ID NO: 655 - DNA, 945 bp, Triticum aestivum
ataagaatttcaagtcatccaacatctgctcgactcagaatacaacccacacgtgttccagaatgctggacttgcaagctttattcctgatggctgagttccagactgcgggaacagagtgccggggtgcactgccccagaggtggacatgactggccagtacactatgaagagcgatgtctacagctttggggttgtcatgctagagcttttgacgggacgcaaaccatttgacagctccaagcctaggtcagagcagtcactcgtgcggtgggcgtctccccagctccacgacatcgatgccctggacaggatggtggatcctgcgctcaagggtctgtaccctgccaagtccctgtcccgattcgccgacgtgctcgccttgtgtgtccaggctgagccggaattcaggccaccaatgtctgaggtggtgcaggcgcttgtccggctggtgcagagggccaacatgacgaagaagatgctcgacggcgacgcttcccggcgaggcgatgaccaggaccaggatttcatatgacgcgagcacaacccttctaatatatcaccccctgatatcgcatccgagattatatttgtttatttcttctagcgcctagcctggccgagagaagagtggaggaacagagcagaattggtgtccggttctgtcagtacatatcacacaggtttcgcttgatttattatacctaagtgttagtgtttggctgtgtcatgtccacaaatcagcatcttggtgtcatcctcttaggacttatctacaagatgctccatataaacatatccatggaatcaggtttggtgattttcaggagagaaatcactgtcatcatcagtgtcagcgctgcctgaatgagctgagaacaagtagcatcagatcatcattgggtattagtcatgtcatattattactgaacctgttcataccaa

SEQ ID NO: 656 - DNA, 690 bp, Triticum aestivum
ctcgcgcagatctccccacgagacgacggcgggtgggcgaccgcgccggacggcccatactcgtggggcctgtgctacaaggaggagatcagcccgcagagcagctactgcgacgccacggacaagcagtggccgtgctaccccggcaagtcctaccatggccgaggccccatccaaatctcatggaatttcaactacggtccggcggggcaggccctggggttcgacgggctgcggaacccggagctggtggccaactgctcggacacggcgttccagacggcgttgtggttctggatgacgcccagggagaccaagccgtcgtgccaccaggtgatggtcggcgagtaccgccccagcagggccgacgccgccgcgaaccgcacggccgggttcgggctggtcaccaacatcgtcaacggtggcctcgagtgcaacgtcgccgacgacgcgcgggtcaacaaccggatcggcttctaccggcggtactgccaggtcctcggcgtcgacgtcgggcccaacctcgactgcgcgcaccagctcccgtactagcccgagggagtaccctcacgtttctcgatcgggagaaaaccatagcctcacgtgctacgtagttgcttaaatttgtagtttagttaagcctacaaagaaaaacacttgtattttgttagtaataaatctaataaatta

SEQ ID NO: 657 - DNA, 640 bp, Triticum aestivum
tgaagagagaaaaagccatgtagggctggaaatctggcgttcctgcttattatcgaacgattctgtaaatgggcttgaaatgtttggtttcatttccccaccaataattgaggtaatcgaggctctagatcccgactcacaagtgcttagattattggttgtctaagcatacacctcctctgagaagactcctttcggagtctttgatgaccacaacggttgatggcactaataattcttctataaggttacttggggttgatattgccagcaacgaatctgaacgatctagtttccacaataattcatgtgctgaagagactaaactcagcaggctccttaagaaggctaaatgcccagaagaacaagaactaattgtcatgaacaaagcaatcagcggcaggatggataacagggcaggtctgcaggatgagatgaagaattatgtagataaatagggccttgaatggataaaccatttttagtaactcatcctagattgcttctctagggaaccattagaaattaaactagaaccaccatttacctgcattcttatagaattgcatttcctgatcttccatttagttttgcatgatccaaatttatttttacttgatggcaaaaggttattttctct

SEQ ID NO: 658 - DNA, 795 bp, Triticum aestivum
aagcaagcattgagcaatcgaacatggcgaggcttcacctttccgtcgtggcggcctgcgccgtcctcctcgcgctcgccgccccctccctcgccggcgacgccgacatgctccaggacgtctgcgtcgccgacctcgcattcccaatcaagatcaacgggttcccttgcaaggccaacatcacggccgacgacttcttcttcgccggactcaagaaggccggcaactacctaactaacccggctggttcggtcgtcaccgcggctaacgtgctgtcattccccggggtgaacacgctcggcgtgtccatggcgcgcatcgactacgccgtgggagggcagaacccgccgcacacccacccgcgcgccaccgagatcattttcgtcaccgagggaaccctggaggtgggtttcatcaccaccgccaacaagctcttcactaaggtcgtcaccgtcggagaggtgttcgtcttcccgacgagggctcgtgcacttaccacgcagaaacaggggcaactgctctgcactcacgtaaatcgccgccttcaacagccaagcattacaagggcaaccacaagccatcgccaaccaacagcatacatatagagacatagccaacaaccaccagtgccaaccgacgatagactggacaaaggcaattacagggattgataaacgaagaacaatacagaacgcacgtaaaggaccaggttcaaatagggagcctcatgccactacatggcaacatccagcatccatttcggaagaaaaataaatcgtcatgtattgatacatg

SEQ ID NO: 659 - DNA, 535 bp, Triticum aestivum
acacccaagggccaacaaatggtgaccgaggacgacttggccagcatggcctacctaaaggccaccgtgaaggaaacgctccggctacacccaccgctgccgctcctcctcccgcacctctccatgaccgaatgcgacatcgacggctataaagtccccgccagaacccgtgtcatcgtaaacgcttgggctcttggtagagaccctggatcgtgggaggctgccgacaagttcatgccggagaggtttgtggacgtcgtgtcccccgacttcaaagggagggattttcagtttctgccgtttggagctggccgaaggatatgtcccgggataaattttgggatggcgtctgtggagatcatgcttgccaaccttgtctattgttatgattgggagctcccggacggcatgcggcaagaggacctggatatgactgatgtgtttggcatgacgatgcgtcggaaggagaagttatttcttgtcccgagacacgtagatgttaatactgcataagtctgtcatgaatatgtgatat

SEQ ID NO: 660 - DNA, 661 bp, Triticum aestivum
gtccacggcgcgaggttcctgtgggtgatgcggccggacatcgtcagctctgacgacctggacccgctgcccgagggggttcgcgtccgccgggcgcgggctggtggtgccgtggtgctgccaggtggaggtcctctcccacgccgcgctgggtggcttcctcacgcactgcgggtggaactccgtcctggagagcgtgtgggccggagtgcccatgctctgcttcccgctgctcaccgaccagttcactaaccggcggctcgtcgtgcgggagtggcgcgtcggcgtgcctatcggggaccgtggcgcggtgttcgcggatgaggtgagggcgaggattgagggcgtcatgtccgggaaagagggtgaggagctccgggaggcggtgaagaagatgagggcgacgctcgaggccgccacgttgcacggcgggtcatcgcagcggagcttcgatgaattcgttgatgagctaacgtgccgttgcggcggatgttaagctgagccggccgatgggccagaagcgcgcatgtcgggtgttggggaagtggccgcgaataagcgtctttgtactcttgtcttgtgtgtagtatgtgcccggtcattgactcagtgccatgtggtgcaatcggtaagtggtatagatcatcatggacgtggaatg

SEQ ID NO: 661 - DNA, 946 bp, Triticum aestivum
ggagttccctttctcatgaaggctggaaaagctttgcatactaaacaggctgagattagagtacagtttcgacatgttcctggaaatctctacaaggggtcttttggaaccgatcttgacagggctactaatgaacttgtgatacgcgtgcaaccagatgaaggaatttacctaaagattaacaacaagattcctggtcttggtatgagactagataggagtaatctgaatcttcactatgcagcaaggtaccccaaggagataccagatgcgtacgagaggctcctgctcgacgcgatagaaggagagcgaaggctcttcatccggtcggacgagctggacgcggcgtgggagctcttcacgcccctcctgaaggagctggagcagaagcggatggcccccgagctatacccctacgggagccgcgggcccgtgggcgcccactacctggcagccaagtacaaggtgagatggggcgacctgggtggctcggaacacgggaggtgatgatttctgtttttggcgtcgcaatttctgcaaaaggccttgcagcgcacgcccagctagtgggggtggtgcgaggaacagatctgaataagggtgagcggttggcgatgcttgtgttcatcgatcgatcgaccgtgagtgagtatatttgttggtaccactggcttacatactctatgattcttaagaggaagcccagagcagaaagctcattcatcctggctgttcgtcggctcatttggttgtctggctgggccgggctgttgtattgggactgctgattgtgtaactgcaaaagctgttacttctttactgatgccggtgttcttgtcgtgttttctagttcaatataagcaagtactgggaagtaaataaacgactccgtattatgcacggtgggtagtaaatttgggcaggatcattgccatgacttgtcctt

SEQ ID NO: 662 - DNA, 619 bp, Triticum aestivum
ggtttccgagatccgtggaccgcggcaagaagtcgcgcatctggctcggcaccgtccccccccgcggagatggcggcgcgagccccgacgtggccgcgctcgccatcaaggccgctccgcgcacctcacttcccggagctcgcccacgagctgccccgcccggactccacgtcgcccgcggacatccaggccgccgccgcgaaggccgccgccaaccgccgccgtgcagtgcgaggccgagccggagcacgagcacgagcccgagacgccgtcgtcgtccggcgccgtttcggagacaccggaggctgcagcctgcaccgaagcggtgcccgcggacagcggcgaggtcgacaatgcgctgttcgacctgcccgaccttcttctggacctgagggatgggctcttctggtcgccggtctggccggtggcgctggccgccgaggagtacgacgggggctgctgcgttgggctcagtgagcctctcttgtgggccgagtaggaatatattcttcagtttttaccgttctgggctcatgaattgctttgctagtgtactagtagtatggcaaggttggctaaaaaaaagtagtatggcaaggataaaagatctagtggtagc

SEQ ID NO: 663 - DNA, 837 bp, Triticum aestivum
cggagggggcggagggaccagcgccgcacgagcagccgccgacaatgcctgcacgtgtccgacgacaggagcggcggcggcgcgtggtgctgctgctgccggtccggcgacgacgcgcctccgtacgagcaccgggggagccggccaggagcgacgcgctgcggcggctcgtcccgggaggcgccgggatggagtactgcagcctgctggaggagaccgccgactacgtccgctgcctccgcgcgcaggtgcagctcatgcagggcctcgccgacctcttctcctgccaatgatccatccagtccatcatcgtcatcaatcatcatgcatcctccggtcgatcgagtaattctaaattattacttcttcctgcaccgtcgatcgaaatcatagggttccatgatatcgatcggtggatctcttgttcatgtgacatgagattggtcaatgcatcgatcgcgcatgatcaatatagaggatcaccggccggcaggggagagttaggtacggtggaggtggagggaagactggtggagtatatatgttgagctgctggcagggtgaattattagtaggtgagaaaagattgggtgtagtatgcatttgtataggttggggacacattggaaccacaccaaggaaaatacaaaggtaattaattgtaacatataaagagataatcgatcgatatggatttacatatgtctatactagtgcagtgttgttgggttaattagcaaattgatccatgcataatatgttcttgattgaactacaaacacatatatgatatgataccatgtcatgtgggtgctatacatcttgaagctatagatg

SEQ ID NO: 664 - DNA, 675 bp, Triticum aestivum
cgccggcaagctggacatcctcataacacgtgggcacaaccatagaaaccaaccactgaatactcggcagatgaatattcgttcataatggccactaatcttgaatctgcatatcatctatgtcaacttgcacaccctcttctcaaagcatccggggtggccagcattgtcttcatatcatcagtctctggagtggtagccatatctagtggctccatttatgccatgacaaaaggtgcgatgaatcagttggccaagaacctagcgtgtgagtgggcgaaagacaacataagaatcaactctgttgctccatggtacatcaagacttcactcgtggaagaggatttggcgaaagaagatttcgtggatagcatcgcccgtcgaactccgatgaggcgtgtgggagaacctgaagaagtatcatcgctggtggcgtttctctgtatgcccggttcatcttatatcactggccagacgatctcggttgatggcggcatgactataaatggcatgtacccgactgagaactagcagaaggggtgaagctgcacggtggttctgagcaaatcgtgatacgtggatcatccgtgtccgtgtgtataacctgtatgggaaggttatcttgacgtacaatctgtatgtgtatgtttttccactttagctaaatgcaagtcg

SEQ ID NO: 665 - DNA, 1039 bp, Triticum aestivum
catgcctgttctcattcgcaggggctcttcgtcctggtgatccaatgtctatcagaggcagctcatcgatcagtgcaggacatcaagtttctgtaaattgttggagtgtgaccttggagagagcaagtgccactccccaagcgcaatcatgaagatgttccagagctctttattctgcttgcagccccagggtgattcctatactagaagatctgccttcgactcaatgttggctggctgcatacctgttttcttccatcctggttcagcatatgtccagtatacatggcatcttccgaagaattatacgagttactccgtcttcatccctgaaggtggcgtccgtgatggaaatgtcagtgttgaggagatactaagaggtatccatccagacatcgtcaagcagatgagggaagaggttatcaatctcataccaaggtgatatatgctgatccaaggtcgaaactggaaacgctgaaggacgcgtttgatgtttcggtttcggcaatcatcaacaaagtgacacaattgagaagagatatcatctcagacagtgaagataaagattttattgaagagaatagctggaaatatgaactgttagaaggacagcggacaattggacctcatgagtgggatccattcttctcgaagcccaagcccaaggacaagggtgcagattctggtaattcatcagctgaagcggccaagaattcttggaaaatcgaacgaggagaccagaattagaccgcacaactgactgctcttagagatgagcaaacagctatcctagctgacggtgcactgatgcaaatccgcggtaaagaatccttagatgctgtagtcttggcgatcatgtatgttcttgatgatccaacccctacagctggtgtaagaagtggtgccaccaaagtccttgagaaaatatgacacatggcctttgctttgcctctacagatatacttttctcatactagaattttcatttgttttgtttgcccataacgctatgtaaatccttgcaagatctagtggtatg

SEQ ID NO: 666 - DNA, 905 bp, Triticum aestivum
ccggcgtgaagggcgtggccaaggacgtgtacggcatggtccagccggtggccaaggtcatctacgtgcgctgcgagccggtggccaaggacctctacgtgcgctacgagccggcggcgagcacctcgccgtctccgcctggcgctcgctcaacgggctgccggtgttcccgcaggtggcgcacatcgtcgtgcccaccgccgcctactggtgcgagaagtacaacagggtgatctcgttcgcggccgggcgggggttccccggcgcacggttcctccccggcatccccatcgagcgcatcgccaaggcgttcgggacgaactcggccggggagcgctcgccggatgccaagccgacgggacttgatgcccagacctccgaggagcgctcgtccgatgccaagcctatgggactggatgcccagacctcctccgaggagcgctcgtccgatgccaagcctatgggactggatgcccagacctcctccgaggagcgttcgcccgatgccaaggctgtgggacctgatgcgcagaccggggaggagagctcgccggatgccaagcctgtggaatctgacgcccagaccgccggggagagccagccggaggcggccaagcctatggatcttggggcccaggcctaggtgtgccgccgtgccgctatcatgccctggtggacgaggtatgtcgcccttggccggaactgaataagataatgtggacccagggctaagaagatactggcatcctgggtttaccgtcctagatacgtgctcacgggtgatgctaatgataatgatgttgtactagctactatgcttttgtgtggtgcgcgtctctaatgttctccgtgcttttgtacaaaaagttgcttgatgtcgccttcgtcgacttgatccatgcatt

SEQ ID NO: 667 - DNA, 913 bp, Triticum aestivum
tctgacactagctatctcctacccacctatcccccgtccgtccgcccgtctaggtctctggagaagcggcgatggcggcgcccgtgacggtgtacgggccggcgatctcgccggcggtggcgcgcgtggcggcgtgcctgctggagaaggacgtgccgttccagctcgaggcggtggacatgtccaagggcgagcacaagtccccctccttcctcaagctccagcccttcggccaggtccccgccttcaaagaccacctcaccaccgtcttcgagtcaagggccatttgccgttacatctgtgaccagtactccgaccgtggcaaccagactctcctaggccggaaagaagacggcgcggtaggccgcgctgccatcgagcaatgggtagagtccgaaggccaagcatttaacccgccgagcttggccatcgcattccagctcaccttcgcgcctctcatgggcatggccaccgacatggccgtggtggagcagaatgaggcgaagctcgccaaggtgctcgacgtgtatgagcggcggctggcggagagccagtatttcgccggcgacgagttcacccttgccgaccttgtgcacatgcccaacactgatctcctcgtgagcaaggccggcaaggcgggtctgatcaccgagagaaagaatctgtccagatggtgggatgaggtctcggctcgtccgtcatggaagaaggttgtcgagttgcagagtgtaccacggccctctaaagcttgagggccccttcagtttttttagccgagcagcttctggtggcaattagtcacattctgttatgtgttgccatcactcctaaatgttattgtgttgtgaaagactcgggctgctttgtacaatatgttatcctgctatctatctctgtggtattattgagtttg

SEQ ID NO: 668 - DNA, 1052 bp, Triticum aestivum
gtctcagcctgagcagccgacaagctcccagacgggtttgcggacgccattgacgggctcgcgaagggcaaagtggtcggctgggcaccgcaggagcaggtattgggacaccccgcggtgggctgctttgtcacacactgcgggtggaactccacgctagaaggcatccgcaatggactgtccatgctgtgctggccatacttcaccgaccagttcacgaaccagacatatatatgtgacatctggagggtcgggctacgggttgcgtcggccgagggtggcgggctggtgatgaaggagagggtggtggagctgctggataggattttcgaggacgaaggtgccaaggaaagggtgctgaggttgaaggagatggcggagaaaaacatgagcgaagaaggcgagtcgttgaacatttgaatgtgctgatggagtccatgggaaggtagaatctgtacaggatggttgttggttcacgtgtcaacgttgtgtcggctatgatcggtattgagctttctcattgtttagcacttggaataaatggtgcgtacagtttatgtttactgtatcattgtggttttagacagtatgttatacttttatttaatataatatgctcccattaatcttacaattacggctcgctctcacctctctttcctaggagcatggtgtaagcctttgccaggcgcttcagaccctttcatcgccgagctactggcctttcgggagggggtcatcttcgcccaactccgaggtttctcacatgtgatcatggaggtggactgctcacagttggtcgacctctggaactcgcgaggcaattctagatcggatgcttcgcccatctttagagagttagcggactacatcgttacttttacttctttttcggttcgacatgttggtagggaacaaatgtgccggcccatctttgtgctcagcgtgcctgtacacttgatgggacggaatgctggcttgagagcagcccggattttatccgacccagcctacgggcagattgtaaccgactactgttattttgaataaag

SEQ ID NO: 669 - DNA, 268 bp, Triticum aestivum
ctctcttcttcttgctctagcactcttcactaagtctccacggtagatggagggcgtcgtcgaggagatcgtcatcgccggcgccgggctcgccggcctcgccacggccctggggttgcacaggaaaggggtgaggtgcgtggtgctggagtcgtcggcgacgctgcgggcgtcggggtacgccttcaccacatggaccaacgccttccgcgcgctggacgcctcggcgtcggggacaagatcagggagcaccatctcgtctacgaaa

SEQ ID NO: 670 - DNA, 869 bp, Triticum aestivum
tggactccggcggcggcgactcgtccggcagcgcgggcgcggctgctgcggcggccaagtggcggagggaggcgacgcgggcgttccagtactacctggaccggtcgacgccgcacgcgacggggcggtgggtgggcacgctggtggtggccggcgtgtacgcgctccgggtcttgtccatccacggcttctacatcgtcagctacggcctcgggatctacctcctcaacctcctcatcggcttcctctcccccatggtggacccggagctcgacccctccgccgccgccggccgggcccgccctccccacccgcggatccgacgagttcaagcccttcatcaggaggctcccagagttcaagttctggtatgcaatcacaaaggcttttgttatagcttttgtcatgactttcttctccgtgttcgacgtccctgtcttctggcctatactgctctgctactggattgtactctttgtgctcacgatgaagcgccagattctgcacatggtcaagtacaaatatgtgcccttcaacatcgggaagcagaaatacggcgggaagaagggtggcgcgagcagcagctcgtcgaaagactgatccccggtgtgcaaggggagaatggaagggcgggcggaagatacagtcgaacgacaaggcttattccatgtgctacatagtaccaacaagtgtaatacttcattcatgatatctagagagagctaggagggacattcgctgcttatgtttccgacatgggttcacggtttaattcgatatattcgtgttacttgtgtcactgtcagtcattgtatagcgtgatcgattctttgttgtcatctcggctcctgttgctccaaatgttgtta

SEQ ID NO: 671 - DNA, 579 bp, Triticum aestivum
tcagaggcggcgcttccgacggtcgggccgatcgtctccttcctggcgtcgaggggcacgccgctgctcgtgtacgtgtacccgtacttcgcctactcggcggagccgtcctcggtgccgctcgactacgcgctcctgtcgtcgtcggccgcggtgtcggtgaccgactacggggtggagtacgccaacatgttcgacgccatcctggacgcggtgtacgcggccgtggagaaagccgggggcggggagagcctggagctggtggtgtcggagaccgggtggccgtcaggcggcggcgggtacggcgccagcgtggagaacgcggcggcgtacatcaacaacctggtccggcacgtggggcgcggcacgccgcggcggcccggaaaggccgtggagacgtatatcttcgccatgttcaacgagaaccagaagccggagggggtggagcagtacttcgggatgttccagccggacatgagccaggtctaccccgtcgacttctcggcatcgtcgtagaagacgcctggctacatgcatggaccacgcatatgcatcgatcatccatgagttaggaagtta

SEQ ID NO: 672 - DNA, 709 bp, Triticum aestivum
gctggtgattccgaagcaagcacgcctgagaagcacttcccgctgcagctcccggccgcgggcggcgagaagcaaggggcctgctcctgaacttcgaggacgccgccggcaaggtgtggcggttccgctactcgtactggaacagcagccagagctacgtgctcaccaagggctggagccgcttcgtgaaggagaagggcctcggcgccggagacgtcgtcgggttctaccgcgcagccgccggcgaggacagcaagctcttcatagactgcaagcagcggccgagcaccaacagccctgcccccgcagaccccgtggaccagccggcggtgcccgtgaagaaggccgtgagactcttcggcgtcgaccttctcacggcgccggcgtcgccggagcaggggatgccggggtgcaagagggccagagacttggtgaagtcgccgcctccgacagcggcgttcaagaagcaatgcatagagctggcgctagcgtagagttggaactattagctcgatcgatctcttctctccagctaggcggcggtttttgctcgcgtaattcaggtggtagagcttagcttaattagtcccttgttggtactatcatcaactttgtttgtttatttgtcatgttgttgcatgccctgatgtaaatcttatcctcccaaaaatgtatactaattgaggaagccctagaaggctagcctaga

SEQ ID NO: 673 - DNA, 681 bp, Triticum aestivum
ggtgtcatgtgtgcactacgtgcctcttcgcctgtctgggccccttggggtggttcatccccagcaagacgttcccgctggagaccgtcgcgggcagagcgtgacggtgtgcgtcaacctgctcttcaccttcctcatcgcgcagccttcctctccatgctctgccacctcaagttcgccatcttcatcttcttctcggcctgggtgctcgtcatgtccgtcttcgtgctcttcttcctcccggagaccaagaacgtgcccatcgaggagatgaccgacaaggtgtggaagcagcactggttctggaagagattcatggacgacgacgaccaccaccacaacatcgccaacggcaagaacgccaccgtctgaaaagtgttgctcctactatgtaaatgtaacgctgcctgcctgcctgcacaactcgacttagaaagaagaaagatggatactgagctttatcatcgatcttatctcgatcgagtgcagacactttcagtcgcgagcccaactattgcactgcttccatttccatatgcgacgaggaacagcaggcagtgtggtagcaaccttgcagttctatatacactcggtcccaaataagcacgtcaattattttgggacagagggtagcagtgtagtgtatttcggtgtttcttgtttagtggtagtatcctttat

SEQ ID NO: 674 - DNA, 525 bp, Zea mays
atgatgcgatgcatggactacggccacaaggttgtcgctttggctaatcttatccccctcgacgacaccgtcgatgagctcgacagctacatgtaccaaactgttgggcaccagattgtggtgagctacgcgaaatgcatgggcttgcctcttttccggaggcgcattcgcggatccacaagggatcagggtctcaggtacagtgtcacggcaggtgatgaggtagaagatatgtttgctctgttgagcgaggttaaacgtcgaatcccatccatcagcgcggtgtcgtcaggtgcaatcgcatccgattaccagaggctccgggttgagagtgtttgctcgaggctgggcctggtctcgctggcgtatctatggaagcaggatcagactttgctcctagaggaaatgataaggaggggcattgtggcaataattgtgaaggttgctgcactggggctgaaaccttcttcccacttaggaattatggaatcaatgtctgtggtgaaggtggagaatatgaaacac

SEQ ID NO: 675 - DNA, 621 bp, Zea mays
  misc_feature (49)..(49): n = any nucleotide
atggtactcactgccggcaccgacacgtcggcgctgaccaccgagtggncaatggcgctgctgctgacacacccggaagcaatgcggaagcctagagccgagatagagactagcgtcggcaccgcgcggctcgtggaggagtcggacatcgcgaacctcccgtacctccaatgcgtggtgaaggagaccctgcgcctgcgccccgtcgggccggtcatcccggcgcacgaggccatggaggactgcaccgttggcgggttccatgtcgaacgcggcacgatggtcctcgtgaacgcctgggcaatccaccaggatcccaagctctgggacgcgccagaggagttcaggccggagaggttcctggacgccgccggtacggtgaccgcggtcaccacgcccatgctgccgtttgggcttggacggcggcgctgccctggggaggggttggcgttgcgtctgattagcttgacgctggcggcgctcgttcagtgcttcgagtgggatgttggtgaaggcggtgtcgttgacatgaccgaaggcgttgggctgacaatgccgatggccatgcccttggctgctgtctgccggccccgggagtttgtcaagggcatgctctctact

SEQ ID NO: 676 - DNA, 279 bp, Zea mays
  misc_feature (185)..(185): n = any nucleotide
  misc_feature (278)..(278): n = any nucleotide
atgacgccgcagccgcccaagccgtcctgccacgacgtcatcacgggccagtgggcgccctcgcccgccgacgtggccgcagggaggctgccggggtatggcgtcctcaccaacatcatcaacggcggcctcgagtgcggccatggcgccgacgctcgtgttgccagccggatcggcttctacanacgctactgcgacatgtttggtctcagctacggcgacaacttggactgctacgaccagagccccttcgggaacacagtcttaagcaccaccant

SEQ ID NO: 677 - DNA, 372 bp, Zea mays
  misc_feature (215)..(215): n = any nucleotide
atggatccgtcgggcggcgcgttcctgccgccgctgcagcaagggagctcctccttcccgcggtcctccagcaacgcgtcgctcgccaggagcggcagcggcggcggcggcgttggcgccgggcgcgggaccaggggcaggaagatgatgcgcagggtctgccgcggcgtcatcaccttcatcttcgccatcgctgggctgttcctgggagcggngaccggcggtctgatcgggctggcgacggagagcgggctggtccccggcaccgggatcggggccatcaccggcgcgctcgtctccatcgaggtcggcgactcctccctccgcctctggcaggcgccccgattcgggatctggagcaccctctacgtc

SEQ ID NO: 678 - DNA, 639 bp, Zea mays
atggtgctcgtccagatccccatgttcaacgagcgggaggtgtacaaggtgtcgatcggggcggcgtgcgggctgtcgtggccgtcggaccggatcatcgtgcaggtgctggacgactccaccgaccccgtcgtcaaggagctggttcgtgctgagtgctggcggtgggcgagcaagggcgtgaacgtcaagtacgaggtccgcgacagccggcgagggtacaaggccggcgcgctccgggaaggcatgaagcgcgcctacgcccgcggctgcgacctggtggccatcttcgacgccgacttccagccggagccggacttcctgtggcgcgccgtgccgttccttctccacaacccggacctcgcgctcgtccaggcgcgctggaagttcgtgaacgcagacgaatgcctgatgacaaggatgcaggagatgtccctggactaccacttcgcagtggagcaggaagtcggctcctccacctacgccttcttcggcttcaacggaaccgctggcgtgtggcgcatatccgctttgaacgaggccggagggtggaaggacaggacacggtggaggacatggatctggcagtccgagcaagcctcaaagggtggaagtttgtatacatcggtgacctcatgg

SEQ ID NO: 679 - DNA, 810 bp, Zea mays
  misc_feature (760)..(805): n = any nucleotide
atgaccacaaagagcaggccagtattaacccaaactagcacaaacgggaggggacgcagagggggggaagcgcacgagtggagggcggtgttggaagatctacggtatgggctggggcggcacgtgcggacaagtcatggtgatgtggggagtcgtggacattggcgttggcgggccggtacttccggcggatgcggcgcagtggccccggttgaccctggacggccggcggccgggggttgggggggggacccgggcagaagtggtcgggggaggttagaccacggaggggggcccaactggcacatgcccgccctggatgtcggggacggacgcaggccgtgcgcccgatggcgacggcccccccgaagcggtccagggcagggtgagtggttggtcagggcgcccgacagcacggtctggaccgccgccaaggactcggaggccacctccgccgccgccgcggtgaagttccccgccgacagcaccgcctccaccgtgcccaggtgcgccagcgtgtgccccagcagctccacgcagtcggccagcgccaggcggtcgcgcacccgcagcgcccccgcgggccgccggaggtacgcggagcagttggacgccgacgcgcgcaccgccgacgccgcgcgcgccaccacggccgagatcacctcgcgggccggcttccgcgccaggtccgggatgctgcctcagcgtcgacgcgcacacgtcgcggtgcagcgtgcccgcgcagtgccgctccacggcnnnnnnnnnnnnnnnnnnnnnnnnnnnnnnnnnnnnnnnnnnnnnntttat

SEQ ID NO: 680 - DNA, 621 bp, Zea mays
  misc_feature (482)..(482): n = any nucleotide
  misc_feature (494)..(494): n = any nucleotide
  misc_feature (519)..(519): n = any nucleotide
  misc_feature (526)..(526): n = any nucleotide
  misc_feature (536)..(536): n = any nucleotide
  misc_feature (543)..(543): n = any nucleotide
  misc_feature (596)..(596): n = any nucleotide
  misc_feature (600)..(600): n = any nucleotide
atggtcgtgctcatggccgtcgcctacacgctggcgcacccgtggttccgccgggggaagctcagcgagggcaacccgctgcgccggctcagcggcttcaacatgttctggtactcgcaccacctcttcgtcatcgtctacgtcgccttcgtcgtccacggcgtctgcctctacatcaacaggacgtggtacaaacagacgacatggatgtacctcgccattcccatccttctctacgccggcgagcggcttctccgggcgctgaggtcccatggcctcaccaccgtgaggatcgagaaggttgccctgtaccccgggaatgtcatcgccattcacatgagcaagccgcatgggttcagctacaagagcgggcagtacatctacgtcaactgcggcgaggtctcgcccttcgagtggcacccgttcaccatcacctcggcgcccggcgacgactacctgagcatgcacatccggtgccgcgncgactggacggncagcttcagggcgtcttccgcgcangtgtgcncggcgcccgncgcgggncagagcggcctcctggcgggccgacttcgcgtcctccacggcggcccggcggncggncggaaacctgccgaagcttgc

SEQ ID NO: 681 - DNA, 423 bp, Zea mays
  misc_feature (397)..(397): n = any nucleotide
atgccacgctcacccgctggcaccatgggcggcgcccggaggtccgggccggccggggcagacaggtacgccgtcatcttcgacgccggtagctccggcagccgcgtccacgtcttccgcttcgacgccaacctggatctcgtccgcattggcagcgagatcgagctcttcgtccagataaaaccggggcttagccactatgccaacgacccccgggaggctgccgagtcgctcgtctctctccttgacgatgccaagcgagtggtgcccgccgaattgcgcgaccaaacgcctgtcagggtcggggccaccgcagggctgagaaatttgggtgcacaaaaatccgaggcaatactgcaagcggttagggaccttcttcgcgaaaagattcctttanaaaccaccggattgggttacagttct

SEQ ID NO: 682 - DNA, 303 bp, Zea mays
atggacttcctgcccgccggcgacggctccgggtgccccaagggcgggccgcgctgcgacgccgacgtcacgtcgcagtgccccgccgcgctgcaggcccccggcggatgcgacaacccctgcaccgtgttcaagacggaccagtactgctgcaccggctcggcgacggacaactgcgggcccaccgactactccaagttcttcaaggggctctgcccggacgcctacagctatcccaaggacgacgccaccagcacctacacttgccccggcggcaccaactacaacgtcgtcttctgccca

SEQ ID NO: 683 - DNA, 318 bp, Zea mays
atggtgaaggagacatgcctactaccgctaccaactcagcagcaaataagcgcaggcggaagaaccagtacaggggaatccggcggcggccctggggcaagtgggcggccgagatcagagaccccagcaagggcgtgcgcgtctggctcggcacatacagcaccgccgaggaggcggccagggcgtacgacgccgaggctcgcaggatacgcgggaagaaagccaaggtcaatttccgggacgaagcggcggcagcagcaggtgctcagaaggcaccagccgcaactactccaactgcttgtggcaacgcagcgaggc

SEQ ID NO: 684 - DNA, 543 bp, Zea mays
atgtatcccaaggcggcagacgaaggtgcgcagccgctggccacgggcatccccttcagcggcggcggcggctactaccaggcgggcggcgcgatggcggcggcgttcgcggtgcaggcgcaggcgcccgtcgccgcctggtccaccgggctctgcaactgcttcgacgactgccacaactgctgcgtgacgtgcgtgtgcccgtgcatcacgttcgggcagaccgcggagatcatcgaccggggctccacgtcctgcggcaccagcggggcgctgtacgcgctcgtcatgctgctcaccggctgtcagtgcgtctactcctgcttctaccgcgccaagatgcgcgcgcagtacggcctccaggtgagcccctgctccgactgctgcgtgcactgctgctgccagtgctgcgcgctctgccaggagtaccgcgagctcaagaagcgaggcttcgacatgagcataggatggcatgcgaacatggagaggcaggggcgcgccgccgccgccgtgccgccgcacatgcatcctgggatgacccgc

SEQ ID NO: 685 - DNA, 243 bp, Zea mays
atggagaaggtgccggtgcgcttcgtcgacgtgaccgcgctgtcggagatccgcaaggacgcgcacacctccgtgcacacgctgcggcaggggaagctcctgacgcccgagcagaaggcgaacccgaggaagttcgcggattgcatccactggtgcctccccggcgtgccggacacgtggaaccagttcgtttatggtcacatcgtgtcgagcccgccgccgccgcaggatcaacctcacaga

SEQ ID NO: 686 - DNA, 552 bp, Zea mays
atgggcggcggcggcggcgtgcatcggcgagcggcggcgctgctcttcgtggtggtgctagccgcggtggatcaggccggcaaaagcgtctgcgaggcgcagctccggcgcgggtactacgccggcgtgtgccccgacgtggagtccatcgtccgcggcgtggtggccaggaaggtccagcagacggcagccacagtcggcgccaccgtgcgcctcttcttccacgactgcttcgtcgagggctgcgacgcgtcggtgatggtggcgtcgacggcgaacaacacggcggagaaggaccacgtcatcaaccagtccctggccggcgatggcttcgacacggtgatcagagccagggcggccgtggacgccgtgccggggtgccgcggcaaggtgtcctgcgccgacgtgctcgccatggccaccagggacgccatcgcgctggccggcgggccgtcgtacgctgtggagcttggtcggctggacgggctgaggtcgacggccagcagcgtcaacgggaggctgccggcgccccttcttccaacctggaccagc

SEQ ID NO: 687 - DNA, 459 bp, Zea mays
atgggaacttttgggtatcttgctcctgaatatgcaatgactggccatcttctagtaaagagtgatgtttacagctacggtgttgttcttcttgagcttcttacagggaggaaaccggtagatatgttaagacctcctggacaggaaaacttagtggcatgggctggttctcttctgacaagcagggatggtctggaatcaatcatagatcattcacttgggcgcagcattccatttgacagcatcgcaaaagtagcagccattgcttctatgtgtgttcagcctgaggtggaccagcgcccattcatgggtgaagtagttcaagctctaaagctggtatgcaatgaaggcggcgagttcaatgagtcaacctttagccaagatttgcatatccaagatgtcgaggttatgagtagagcaagtacgggatgtagaacgttgacccacaccgctatttgt

SEQ ID NO: 688 - DNA, 447 bp, Zea mays
atggcggaccagctcaccgacgaccagatcgccgagttcaaggaggccttcagcctcttcgacaaggacggcgacggttgcatcacaaccaaggagctcggaactgtcatgcgatcactgggtcagaacccaaccgaggctgagctccaggacatgatcaacgaggtcgatgcggacggcaacggcaccatcgacttcccggagttcctcaacctcatggcccgcaagatgaaggacaccgactccgaggaggagctcaaggaggcgttcagggtgttcgacaaggaccagaacggcttcatctctgcggcggagctccgccacgtgatgaccaacctcggcgagaagctgaccgacgaggaggtcgatgagatgatccgcgaggccgacgtcgatggtgatggccagatcaactacgaggagttcgtcaaggtcatgatggccaag

SEQ ID NO: 689 - DNA, 606 bp, Zea mays
  misc_feature (499)..(499): n = any nucleotide
atggccggcggtggcatcgtgaacacgggcggtggcaaggactaccccggcaagctcaccctcttcgtgttgctcacctgcatcgtcgccgccaccggcggtctcatcttcggatatgacatcggtatctcaggcggcgtgacgtccatgaacccgttcctggagaagttcttcccggaggtgtaccggaagaagcaggaggccaagacgaaccagtactgcaagtacgacaaccagctgctgcagaccttcacctcctccctctacctggccgcgctggtcgcctccttcttcgccgccaccgtcacccgcgccgtcggccgcaagtggtccatgctcgtcggcggcctcaccttcctcgtcggcgccgccctcaacggcgccgcccagaacatcgccatgctcatcgtcggacgcatccttctcggagtcggcgtcgggttcgcaaatcagtccgtgcctgtgtacctgtcggagatggcgccggcgcgtctccggngcatgctcaacatcggcttccagctgatgatcaccatcggcatcctggctgcggagctcatcaactacggcaccaacaagatcaaggcccggttacgggttggcgcg

SEQ ID NO: 690 - DNA, 396 bp, Zea mays
atgtataactcgataactgatcgtacgtactgtgtgctggacacatccttgtactttcactttctgactcgctcgttaactaagcagcacattaagaagcacatccggctagcatcagccggtgccggtgaccccgagatccggcttcccgtcctccgtgccggcgccgaacaccggcccgcccttgcccgcggcatcctcgaccgcgtcctccagcttcctgacaggcagcccgcgctcgtcctcggccgaccggagctccgtccgcggagtctgccttctctcctggtcctcttgcccctgcccctgcccctgggccgcgccgccaccggtggccgcagccgacgtgtaggtggtcgccgtgaaggcgcccttcggctgagctccttgcgcgcc

SEQ ID NO: 691 - DNA, 351 bp, Zea mays
atgctttccatccagctccgtgggtccgcagccaagggcaagctcgtgaaggtcaaggcttcgtacaagctctcggacgccgccaagaaggcatcccccaagaccaaggctaagccggcaaaggccgccgctgccaagaccaccgcccccaagccggccaaggccgccgccgccaagtcaaagaaggcagcggctgccaagccaaagaaggccgctgctgctgggaccaagcgcaaagtgcccgagaagaaggtcgtggcgaagccgaagaagtcccccgccgccaaggccaaggccaagccgaagaccgtgaagtcccctgcctccaagaaggcacggaaggcctccgca

SEQ ID NO: 692 - DNA, 153 bp, Zea mays
atgacctcgtccgcgcactcctcaacgccgacctcgtcggcttccacaccttcgactacgcgcgccacttcctgtccgcgtgctcgcggctgctcggcctcgactaccagtccaagcgcgggtacatcggcatcgagtattacggccgcaccg

SEQ ID NO: 693 - DNA, 507 bp, Zea mays
atgcatgcattcgtgccatgcagggtgcgtgcatatgtaatctcgtacgtgaacagctacgagcgtgtgaccgccggaagctgcttacgcgcacaagtagcccttgggcacgcacttgccacagtagttgacgagggcgctgagcttgatggggacatcgatgacgacgccgagcacgttggccttgatggccgtgcagaggcagacggcggcctcgaagtccgcaaggcctttgatgagggtacagcatggctcggcaggcaccttgccagcctcgcctttgacgaggccgagcacatcggcgcacacgccgaacttgagcgcgttcagcgggcacttgccgctggacgaagggggtggggtagcagcaggaggcggcggcggtggctcgaccgggggcgttggggtcgggcagttgccgcaggcgttggccaccgtgaagaacaggaggttgagagccaagaagaggacggccttggatgccatggctctcaggcgggccttact

SEQ ID NO: 694 - DNA, 387 bp, Zea mays
atgagtggtgtggaatgtgggaagaataggtggaggggagtagaaaataagattcgtggaagagattcgttgtggttggaggggggaagccggtggggaggggggggcggggagagcgggcagggtgtggaaaaaaatattatggtgggagttaaaggttgggaaggcggcgcctcgatggttggtgtagtaattgtgtggaaaggtgtcaggagtggtcgggtcgaggtcgttgagcgccgacgcgttgccggccctcgggcaccgcagggagaggatcgcccggtaccccctgtccagcgtcgggtccggccggttcgtcccgctgaagttgtacagccgcgccgtcacgaactggcactgcacgcgcccgaacgtgtgcgcccc

SEQ ID NO: 695 - DNA, 417 bp, Zea mays
atgacgtgtgcgccgctgcagcgtgccagcgtcagcggcggcttgtggttccgcaggtactgcaggaacgtgttccagtcccggcgcttctgcgactcgtaccggctgagccccgccggaggctgctgcgttagcggctgcggctgcggctgcgcctgggcccttactgctggctgttccctctgctgtgctccttgttgctgctgtgcttcctgctctgcctgctgccggctcgacgaggaggctgctgcggcggccgaggacgacgacggcgacggcccggcctctgctggctcactggttcctcctccgccaccaccaccggcaggcgcgtccggaccaggctccatggccagcaactccccgatcgatccgttagcagctctccctgcctgctgccgtttaagtgtagccgtt

SEQ ID NO: 696 - DNA, 192 bp, Zea mays
atggctgacttggcaaggccagtggccgtgcccaccaggccggcctggcgaacctccttcgcagccgagcgggccaaggttggggcttccttcaccactggagggacgcggcggtctatctcctcaacggactcaccaaccttgcggtcgatgaacttgaggaggtcgagcgggacggcgtggaaacggtcg

SEQ ID NO: 697 - DNA, 489 bp, Zea mays
atggtggtctcgctctggcacttcctccggcgcgccaagccggacctcttgttcgccgacacgttcgagtccgtctgcgacggcaccgtggtggtcggcccggtctgggaccacgtcctctcctactggcgtgcgagcgtggcggccccggacagggcgctcttcctcaggtacgaggacatgctgcgggaccccggcggcaacgtgcggcggctcgccgagttcatgggccgcccgttctcggccgccgaggaggccgccggcgacgtcgcggccgtcgtggagctctgcagcttcgacgagatgaaagggctggaggtgaacaggcctggtagcggcaccgcggggaggtaccgccccatgccgcgcgacgccttcttccggaagggtgtcgccggggactgggcgaaccacatgacgccggagatggcggcgcggctggacgggatcttccgtgaaaagctccaagggacggggcttatcttctca

SEQ ID NO: 698 - DNA, 159 bp, Zea mays
atgggcaagaaggaagtgaacacggctgccgctgcggcagctgaggagaaggcgtgggtgccggaccctgtcaccggctactatcgcccagcaggtagcgccaaggaggttgacgcggcggagctacgcgccaagctgctgacggaggctgcggccaac

SEQ ID NO: 699 - DNA, 819 bp, Zea mays
atggccacggtggagacctcgggcacggcgatagggtcctccgggagatgggcactacacggcaagacagccctcgtcaccggcggcacccgcggcatcgggcgtgcggtagtggaggagctggcggcgctgggggcggccgtgcacacatgctcccggaaggcggaggagctcggcgagcgcatcaaggagtgggaggccaggggattcagcgttaccgggtccgtctgcgacctctccgagagggaccagcgggagcggttgctccgcgaggttgccgaccgcttcggcggcaagctcaacatcctcgtaaacaatgtaggaacaaacataaggaaaccaactactgagtttactgcagaggaatactcgtttctgatggctactaatcttgaatctgcatatcacttgtgccaaattgcacatcctcttttgaaattatctgggtcaggcagcattatattcatatcatctgttgctggagcgataggaatctttagtggaactatatatgctatgactaaaggtgccattaaccagctaaccaagaatttagcttgtgaatgggctaaggacaacataagagccaactctgtcgctccgtggtacatcaccacttcacttacggaaggaattttggcaaataagaactttgaggaacaagttgtgagtcgaactccgcttggacgtgtcggagaacctggagaagtatcggcacttgttgcttttctttgcatgccgggttccacttatattagcggccagacgattgcggtcgacggaggtatgactgtgaacgggttttaccctcccaagccc

SEQ ID NO: 700 - DNA, 531 bp, Zea mays
atggtgcagcggaaatctaaaggggcggcccaaagggggcgggaaacaaaggcgtggttttacgcccagcaaggggggttcgttcctgtaggtgtcttcggccagcatggcgtcgtgaagcccggagcagattggcgggatagcagagggctcctacggcagcggcaagccctccctgtgggtcgtccgggccacggaggccgccaaggtacccaaaggcttcgccgacagggcccaggccaccagggggctcctggtgtcgtggtgcccgcagctggaggtcctggcgcaccccgccgtcggctgcttcttcacgcactgcggctggaactcgacggtggaggcgctcagcgccggcgtgcccatggtggcgatgcccgactggtcggaccagacgaccaacgccaagtacatacaggacgtgtggcgcgtcggcgtgcgggtgcgcccggacggccggggcgtggtgaggagcgaggaggtggagcggtgcgtgcgggacgtcatggagggggagatgggcgaggagtt

SEQ ID NO: 701 - DNA, 579 bp, Zea mays
atgccctgcggccactgccgccagttcctgcaggagatccgcggcgccgccagcatccgaatcctcgtgaccagcgacgccgctgagggatgcgcacccgagtggcgcacggtggcgtccctcctcctccgccccttcgggccccacgatctcctccccggagatgtgcccctcgtcctcgaggctcacgacaacgccctgggtgatcccgtcgccaatggcctcgcccgcagcgacctggacgcgcgcctgaggcaggccgcggaggcggcggcgcgggcggcgcacgcgccgtacagcaagtgtccgtcggggttcgcggtggcagacggcgacgggaggatctatgccggcggctgcctggagtccgcggcctacaacccgacgctgggtcccgtccaggcggccatcattgcgatggtggcagccggaggctgctccgccggggacgtggtcgcggcggcgctcgtggagaaggagcaggcgtcggtggcccaggaggcgacggccaggatcttcctcgacgccgtggccccacatgccagctttcacgtctacaactacaggccgtccgatgct

SEQ ID NO: 702 - DNA, 765 bp, Zea mays
atgtgcggcggagccatcatcgccgacttcgtccccgccggcgcccggcgcccggcaacagacgacaccatgtccgcctccatcctctccggcgaggaccatccggagctgccgctgccgctgccggcgccggcgccggggcgcaagacggcgtaccgcgggatccggcgccgcccgtggggccggtgggcggcggagatccgcgacccgcggaagggcgcccgcgtgtggctcggcacctacgccaccccggaggacgcggcgcgcgcctacgacgtggcggcgcgcgagatccgcgggcccaagggcaagctcaacttcccgcccgcccgtcggcggcggcgcgtcgcgcgccgggcgccggcggcgggccaagaggcgccgcaagtccgcggcgaccgaggagagctcggcctcgtctcctcctccctccggcggcggcggcggccgtcgtcgtggcgggcggcggggaggaggcgctgcgcgactgcatgtctgggctcgaggcgttcctggggctgcaaaacgccgacgagggtggcggcgtcgaggcgtgggacgccgtggacctcatgttggcgtaggccgtacgccttagcaggggggcccagcgccagcgccagccccagccccagcgcgcgcgtgccgcgtgccgtcgctgtgaacggccgccgcagctgttttggatcgagtaataatattattagtagtataatgtttctccaagcagctaagataattgcaagccttgctgggtggtattac

SEQ ID NO: 703 - DNA, 288 bp, Zea mays
atgaaggctttgaagaagatgaagaatgccaagcaagggtcctcgggtggcaatttgtgccccctgatcattaccattatcttctgcatcgtcatactgtggcaaggtttcttctcgggacacgagtcggcggtgagtttccatggatcgcccgagtcctcagtcagggcacacagcagtctgatctccatcaggttctacaagaagaaccattccaatgtgagaccacccagcgagaccaccgcagcccctgataacgtagagacagtttcaaggctcctggaaccg

SEQ ID NO: 704 - DNA, 957 bp, Zea mays
atggcagtactgcacttgcaggcggcggcggtggcggtgctgctgatggcgacggggctgcgcgcgcagctgcgtgtgggcttctacgacagctcgtgcccagcggcggagatcatcgtgcagcaggaggtgagcagggcggtggcggccaacccgggcctcgccgccggcctgctccgcctccacttccacgactgcttcgttgggggctgcgacgcgtccgtgctcatcgactccaccaagggcaacacagcggagaaggacgccgggcccaacctcagcctgcggggcttcgaggtcgtcgatcgcatcaaggcgcgcgtcgagcaggcctgcttcggcgtcgtctcctgcgcggacatactcgcgttcgcggccagggacagcgtcgcactcgccggcgggaacgcgtaccaggtgccggcggggcggcgggacgggtccgtgtcgcgcgcgtcggacaccagcaacctgccgccgccgacggccaacgtcgcgcagctcacgcagatcttcggcaccaagggcctgacgcagaaggagatggtcatcctgtcgggcgcgcacaccatcggctcctcgcactgcagctccttcagcggccggctgtcggggtcggccacgacggcgggcgggcaggacccgaccatggaccccgcgtacgtggcgcagctggcgcggcagtgcccgcagggcggcgacccgctcgtgcccatggactacgtctcccccaacgccttcgacgagggcttctacaagggcgtcatggccaaccggggcctgctgtcctcggaccaggcgctgctcagcgacaagaacaccgccgtgcaggtcgtcacctacgccaacgacccggccaccttccaggccgacttcgccgccgccatggtcaagatgggctccgtcggcgtgctcaccggcaccagcggcaaggtcagggccaactgcagagtcgcc

SEQ ID NO: 705 - DNA, 786 bp, Zea mays
atggccctacagcggccactacctcccgaccgaggagaacttcagggagttcatcgccttcctcgaggacaacaacgtcgacctcgccaacgtcaagcgatgctcggtggacgacgacgagttcccgtcgttcaagaagccggcggcgggtacagaagagaagcagcaggcagcagaggaggcagccccagtggcgacagaagaggagccacgacccgtgccggagctgcccgcggtggacatcgtgaaggagggcacgggcacggccgcggacgcggagccgccgaagacggcgatgggcaggcggccgtcgttcaagtggtcgacgcccacgggcgcgcgcatcggctgcctccagaactacccggccgacgtgcagagcatggccctggagcaggtgaacctgtcgccgagggtggcggcggtggcgccgtcgccgcgcctgcccatcccgtcgccgcgccccagccccaggatcaggctgtcgcccggcctgcactacatgggctgccccaccccgacgggcgccagcaggctcgcgaccccgaccccggcgtgcaggcgctcctcgcccaagcagcagcagcagcagcagcacttgatggggttccgcgcgccggccgtggcgctcacgctccccaagcacaaggccaagtgatctgcttgctgcccattgacacctcgccgcagcggcgttttccggaggtgttgctgcgttgcgccgggttaacaattttgttgattggtttgttgcgttctctgatcggctaccattctttcgtacgt

SEQ ID NO: 706 - DNA, 264 bp, Zea mays
atgatagaagcatcttttgaggaactcttccattttctcgctacaattttcccttttatctattctgcaagtcagtgttttgctaaccatgttcctcagttcagcatctgtcatcttgctccgtgcatagccaaagatggtgaaatgcttgggaaggcaatcttcatagtagagagcaaaaagggcaggaaatatcttcttcttggcaaggtcaccagatgctccaactactgtgatgctaacagtagaatcatcattcttgca

SEQ ID NO: 707 - DNA, 774 bp, Zea mays
atggcttgcgagggcgtcttccacaccgcatcgcccgtcgtcaccggatctaattccaaggaggagatgcttgattcagcaataaacggcacgatgaacgtgctacgctcgtgcaagaagaacccatcgctcaagagggttgtcctgacatcctcgtcgtcgacagtgaggatcaaggacgaagccgacctgccccctaacgtgctgctggacgaatcgtcgtggagctccatcgagttctgcgaaagtctccagatatggtacgccgtcgcaaagatcctcgccgagaaggcagcctgggagttcgccggagagcacaggatcgacctcgtcaccgttcttccgaccttcgttgtcggacctactctgtctcctgagctcggccccaccgcttctgatgtcctcggcctgttccaaggagagacggggaagttcacgacgtacgggaggatggggtacgtccacatcgacgacgtggcgaggtgccacatgctggcgtacgaggccgcgggcgcccgagggaggtacatctgcagcgcggcggtgctggactgcggcgacctcgccgccctgctcgcgcggcggttcccagcgtaccccgtcccgaggagcctgccccgcgcctacggcgagcagtcgtacggcttcgacacgtccaaggcccgcgcgctggggctggcggaattcaagggcgtcgaggagatgttcgacgacgccgtcgcctcgttcataggccatggccatctccccgccgccgaggaacgccggcacgcg

SEQ ID NO: 708 - DNA, 666 bp, Zea mays
atggcgcccaagaacgctctccccgccgccagcggcatgacgctggagccgaggtaccgcggcgtccggaagcgcccctggggacgctacgcggcggagatccgggacccggccaggaaggcccgcgtgtggctcggcaccttcgacaccgccgaggccgcggcgcgcgcctacgacgccgccgcgctccacttccgcgggcccaaggccaagaccaacttccccgtcgcgttcgccacggccacggccacggacacgcgcgcgctcccgctcccgctccggctcccgctgccgtcgccgccgccgcccaagaagctggccgtgagccccagcggcagcaccgaggagtcgtcgtcccgggactcgaccgccgcgccggcccccgcgccgtcgctcgacctgagcctcggcatgccgcccatggtggccgcccagccgttcctgttcctggacccgaggctcgcggtgaccgtggccgtggcggcgcccgtgcctcgccggccgaccgctgctgccgcgggcgcgggcgccagcaagcaggcagcatactcctgctgccgtgaagacgagcagagcgacaccgggtcgtcgtcatccgtggtggacgcctccccggcggtcggcgtggggttcgacctcaacatgccgccgccgggcgaggtggcg

SEQ ID NO: 709 - DNA, 939 bp, Zea mays
atggccggcgtccccgtcccgcccgatctcctccgccccgccccccacgccgccgccttctccttcgccagccccgccgcgtcgcccttctaccatcaccaccaccaccacccgtccctgagttactacgcctactacgggaagaagctggacccggagccgtggcggtgccgccgcaccgacggcaagaagtggcggtgctccaaggaggcgcaccccgactccaagtactgcgagcgccacatgcaccgtggccgcaaccgttcaagaaagcctgtggaatccaagaccgcctcctcgccgccccagctgtccaccgtcgtcaccaccaccaccacccgggaggccgccgccgcgacgccccttgagtccctcgcgggggcggggggtaaggctcacggcctgtccctcggcggcggggctggctcgtcgcacctcagcgtcgacgcttcgaacgctcactttcgctatggcagcaagtaccctcttggagctaaatccgatgctggcgagctgagcttcttctcaggagcaccagggaactccaggggcttcaccattgattctccagcagataactcttggcactccctgccatccaacgtgcccccgtttacactgtccaagggcagagactctggcctcctgcccggtgcctactcctactcccacattgaaccaccgcaggtgctcggccaggtcaccatcgcctcgctgtcacaggaccaggagcgccaccagtcgtcgttcagcagcggcggggccggcgctggtggattgctggggagcgtgaagcaggagaaccagccgctgaggcccttcttcgacgagtggcctgggacgcgggacgcgtgggcggagatggacgacgcgaggtccagtaggacctccttctcgacgacccagctctccatctccattccgatgcccagatgtgat

SEQ ID NO: 710 - DNA, 426 bp, Zea mays
atggagggcggcgactcgtccggcgccggcgccggcggcgccgtggccgcggcggccaagtggcggagcgacgcgtcgcgggcgttccagtactacctggaccgctcgacgcctcacgccacggggcggtggctcggcacgctcgccgccgcggccatctacgcgctgcgggtttacatggtgcagggcttctacatcgtcacctacgggctcgggatctaccttctcaacctcctcatcggtttcctctcccccatggtcgaccccgagctcgacccttccgccgcctccgaggggccggtgctgcccacccgggggtccgacgagttcaagccattcatcaggcgcctccccgagttcaagttctggtatgccatcacaaaagcttttgttatagcttttgtgatgactttcttctccagtgtt

SEQ ID NO: 711 - DNA, 402 bp, Zea mays
atgtacagcttcaaggtgaagccctgctcccgcgcctactcgcacgactggaccgagtgccccttcgtgcacccgggcgagaacgcgcggcgccgcgacccgcgccgctactcctacagctgcgtgccctgccccgagttccgtaagggcggcgcctgccgcaagggcgacggctgcgagtacgcgcacggcgtcttcgagtgctggctccacccggcgcagtaccggacgcgcctctgcaaggacgaggtgggctgcgcgcgccgcatctgcttcttcgcgcacaagcgcgaggagctccgcgccgtcaacccctccgcggtgtccgtcggcatgcagatgcagcccaccgtgtcgccgccgccgcccagcggcctcggcgacatgctcagcccggcggcc

SEQ ID NO: 712 - DNA, 552 bp, Zea mays
atgcgttgcatgcatgcagtacctctcgtacgtgggaaagcaatcaaacggaaccatgcatcactgaaacggaaccatgcatggaatggaagggaggcagcgcaaggcgatgatgagacggagaggcgctcagcacttgaagccggtgggcacggtcctgccgcagtagttgaggatgaggctgagatcgaccggcaggttgaggttgatgccgaggatgttgcccttgatagcagtgcagaggcaggcggcggcctccaggtcgacgagcccctccagcagcgggcagcatggctccgcgggcggcgcgcccaccttagccttgatgaggcccagcacgttggcgcacacgcccaacttgagcgcgtcgcgggggcacctgccgaacgacgacggcgtgggcgtcggcgtcggcgtcgagggggtcgagcagttgggcgtgcaggcgttggctacgcccagcaccaccaggttcacggccaggaacagcgcgaatgccttggacgccattgctcgatcacaacaagcagccagctacctcgcggatcacgc

SEQ ID NO: 713 - DNA, 735 bp, Zea mays
atggggcgcgggaaggtgcagctgaagcggatcgagaacaagatcaaccgccaggtgacattctccaagcgccgctcggggctactcaagaaggcgcacgagatctccgtgctctgcgacgccgaggtcgcgctcatcatcttctccaccaagggcaagctctacgagtactctaccgattcatgtatggacaaaattcttgaacggtatgagcgctactcctatgcagaaaaggttctcatttccgcagaatatgaaactcagggcaattggtgccatgaatatagaaaactaaaggcgaaggtcgagacaatacagaaatgtcaaaagcacctcatgggagaggatcttgaaactttgaatctcaaagagcttcagcaactagagcagcagctggagagttcactgaaacatatcagaacaaggaagagccagcttatggtcgagtcaatttcagcgctccaacggaaggagaagtcactgcaggaggagaacaaggttctgcagaaggagctcgcggagaagcagaaagaccagcggcagcaagtgcaacgggaccaaactcaacagcagaccagttcgtcttccacgtccttcatgttaagggaagctgccccaacaacaaatgtcagcatcttccctgtggcagcaggcgggagggtggtggaaggggcagcagcgcagccgcaggctcgcgttggactgccaccatggatgcttagccatctgagctgc

SEQ ID NO: 714 - DNA, 357 bp, Zea mays
atggaggagaacaggaacctgccgcaggaggcgttcgacacggtggagctcgccaaggctgccgtggagagcaagtgccccgggatcgtctcctgcgccgacgtcctcgccctcgccgcccgagactacgtccagctggtgggtgggccgtactacgcggtgaagaagggccggaaggacagcaaggtgtccctggcggggaaggtccgcggcagcctgccgcgggccaactcgacggtggacgagctcctgcgcgtgttcgcgggcaagggcctgggcgcggcggacctggtggcgctctccggcgcgcacaccgtcggtttcgcgcactgcgtacacctgctgtgccttctctac

SEQ ID NO: 715 - DNA, 474 bp, Zea mays
atggtcgccgagcaggccaccaccactgtggctgtgggcgagccgccaactgccaccccgcagccggcggcggcagcggctgcggggcagaggtccgtgcccacgccgttcctcaccaagacgtaccagctggtggacgacccggcggtggacgacgtcatctcgtggaacgacgacgggtcggccttcatcgtgtggcggccggcggagttcgcgcgcgacctcctgcccaagtacttcaagcacaacaacttctctagtttcgtgcgccagctcaacacctacgtgagcgactcgtcccgttgcatccatcgtttcattcccgtcccgtctcgtctcggcttgtttgttgtgatccggggctccaacgggtgcaggggttcaggaagatcgtgccggacaggtgggagttcgcgaacgactgcttccgccgaggggagaagcggctgctctgcgacatacaccgccggaagg

SEQ ID NO: 716 - DNA, 498 bp, Zea mays
  misc_feature (282)..(284): n = any nucleotide
  misc_feature (286)..(286): n = any nucleotide
  misc_feature (288)..(289): n = any nucleotide
  misc_feature (295)..(296): n = any nucleotide
  misc_feature (299)..(299): n = any nucleotide
  misc_feature (302)..(302): n = any nucleotide
atggaccctagcctgaaggaggaggtgatgaaggcggtggaggaggcgaggtccgcgtcggtgccgcggtgccgggtggtgcgcatcatcgtgcacgacgaggacgccaccgactcgtcctccagcgaggacgaggacgaggacgaggcgggggagcgcgcctcgccgcatccgggctcgccgtcggcgtcggcgtcggcggggagcgtgaagcgcagccgcgtgctgctccagtccgccgggtgcggcgcggaggaggacgaggaggaggaggagggttannntntnnccgtcnnggnccngggccctctctcgcgtgataaccggtcctgccctaactgccggttcccccctcgcccccttcacctctcctacaccccctccccccctccccccgccctcccctttgttgccccctcccccgctctcccccaccccctatctctctaccttttctcctctcactccccccatccacctcccacccctcttccatcc

SEQ ID NO: 717 - DNA, 258 bp, Zea mays
atgacgccccgggcgcccaagccgtcgtgccacgacgtcatggtggggcggtaccggcccagcgccgcggatgttgcggccaaccggaccgcgggctacgggctcaccaccaacatcatcaacggcggcatcgagtgcggcaagagcggcgtcccgcaggtggacgaccggatcggcttcttccgggagtactgcaagctgctccgcgtcgacgtcgggactaacttggactgtgctcagcagcagccttactcttcc

SEQ ID NO: 718 - DNA, 1167 bp, Zea mays
atggggggtgtgcgtagctacttcttcatcatcgccgccgcggtcgttgccgtcgtcctcgcgcttctcccggccggcgccacaggtgccggcctcaaggtcggcttctacagcaagacatgcccgtcggcggagtccctggtgcagcaggcggtggctgccgccttcaagaacaacagcggcatcgccgccggcctcatccgcctgcacttccatgactgcttcgtcaggggctgcgacggctcggtgctgatcgactcgacggcgaacaacacggcggagaaggacgcggtcccgaacaacccgagcctgcggggcttcgaggtcatcgacgccgccaagaaggcggtggaggcgcggtgccccaagacggtgtcctgcgccgacatcctggcgttcgcggcgcgggacagcatcgcgctggcggggaacaacctgacgtacaaggtccccgcggggcggcgcgacgggcgggtgtccagggacacggatgccaacagcaacctcccctcgccgctctccaccgccgccgagctcgttggcaacttcacgcgcaagaacctcaccgccgaggacatggtggtgctctcccggcgcgcacaccgtcggccgctcccactgctcctccttcaccaacccgcctctacggtttcagcaacgccagcgacgtcgaccccaccatcagctccgcctacgccctcctgctgcgggccatctgcccgtccaacaccagccagttcttccccaacaccaccaccgacatggacctcatcacgcccgcgctgctcgacaacaggtactacgtcggcctcgccaacaacctcggcctcttcacgtccgaccaggcgctactcaccaacgccacgctcaagaagtccgtcgacgccttcgtcaagagcgaaagcgcgtggaagaccaagttcgcaaagtccatggtcaagatgggcaatatcgacgtgctcacgggcaccaagggggagatcaggctcaactgcagggtcatcaacagcggcagcagcagctctggattatttcagcttcacacggcaaccgcctctgccgaggaattcgcccacgttgcaaccaactagcagctactatatctctatccgtagaggatctagtgatctactgctgctcagtgaccatgttcttcgatgttgcaat

SEQ ID NO: 719 - DNA, 423 bp, Zea mays
atggcttcaacgtgcccatgtccttccagtgccgcggcaggggccccagctgcaaggccgacatcaacgcccagtgccccgccgcgctcaaggtgcccggcggctgcgccagcgcctgcgagaagctcggcggcgacacctactgctgccggggccagtacaaggacaagtgcccgcccacggactactccaggttcttcaagaggctgtgcccggacgcctacagctacgccaaggacgaccagaccagcaccttcacctgcccacagggctccaactacgatgtcgtgctctgcccgtgagccacatgttcgagagatcaacgaccatgcattcgcagctcgcaacaagtgcacactagtacaactatacacaagaaataagagtcgcgatatttattattatcgcgcgtggagtagttgg

SEQ ID NO: 720 - DNA, 777 bp, Zea mays
atgtggacgagggctttagcgacggtgctgttcgtggcaggcgccgcgctgctcggcgtcggcgtcggcggcgccagcgcgcagcagggcgtgtggagcatcatcactcgtcccatgttccagagcatgctgagccaccgcggcgatagcgggtgccagggcgccttctacacctacgacgccttcatcgaggccgccagcaagttccccggcttcggcaccaccggcgacgagcagacgcgcaggcgggagctcgccgccttcttcggccagacgtcccacgaaaccaccggtggatgggcgactgctccgggtggaccgtttgcctggggatactgccgggtgaaggaacagaacccgacggacccaccctactatggacgaggacccatacagctaactcatgagtacaactacaggctcgccgggcaagcgctgaacctgaacctggtgggcaacccggacctggtggcgagcgaccccgtggtagccttcaagacggccatctggttctggatgacgccgcagtcgcccaagccgtcgtgccacgccgtgatgaccggcgcctggacgccgtccgccaccgaccgcgccgccgggaggctccccggatatggcctcacctcgaacatcatcaacggcgggctagagtgcggcaagggccagtccaccgacggcgccaaggaccgggtcggctactacaagaggtactgcgatatgctccgggtggggtacggggacaacgtgccctgcaaggaccagaagccttacggagga

SEQ ID NO: 721 - DNA, 720 bp, Zea mays
atggggaggggccgggtcgagctcaagcggatcgagaacaagatcaaccgccaggtcaccttcgccaagcgccgcaacggcctgctcaagaaggcgtacgagctctcggtgctctgcgacgccgaggtcgcgctcatcatcttctccaaccgcggcaagctctacgagttctccagcacgcagagcatgccaaaaacacttgaaaagtaccaaaaatgcagttttgcagggcctgaaacagcactccagaatagagagaatgagcaactgaaaagtagccgcaatgagtacctcaaactgaaggcacgtgttgataatttacagcggactcaaaggaacttgcttggtgaagatcttgagtcattaggcataaaagagctggagcacctggagaagcagctcgattcgtccttgaagcacataagatctacaaggacacaacacatggttgatcaactgacagaacttcagaaaaaagaacaaatgttttgtgaagcaaataagtgtcttcgaagaagactggaggagagcaaccaggttatatggcagcatgcgtgggagcaaagcgagcggcattctgaagtgcagccgcagcagctcaatggcaataacttcttccatcccctcgatggtgctggtgaacccacccttcagatagggtatccttcagaggcactgactagctcatgcatgaccaccttcctgcccccgtggttgcca

SEQ ID NO: 722 - DNA, 894 bp, Zea mays
atggcgacgtcgtctcgtcgggtgcccttgctgctgctgtgcctgggcgtgctggtgtcctgctccttcgcggcgggcagcttggaccaggagctggacatcacgtggggcgacgggcggggcaaggtccttgacaacgggcggctgctgacgctgtcgctggaccgcacgtccggctccgggttccagtcccggcacgagtacctgttcggcaagatcgacatgcagctgcggctggtgccgggcaactccgccggcaccgtcaccgcctactacctgtcgtcgcagggcggcgcgcacgacgagatcgacttcgagttcctgggcaacgtgtccggcgagccctacacgctgcacaccaacgtgttcacgcgggggcaggggcagcgggagcagcagttccgcctctggttcgaccccaccgccgacttccacacctactccatcctctggaaccccaagcacgtcatcttcatggtggacgacatgcccatcagggacttccgcaacctggagagcaagggggtggcgttccccaagagccagccgatgcggctctactccagcctgtggaacgcggacgactgggcgacgcagggcgggcgcgtcaagacggactggtcccacgcccccttctccgcctcctaccgcgggttcaaggccgacgcttgcgtcgccgtcgcgggcggccggacccgctgcggcgccaccgtcggcaccgagggcaccggcgcccccgcctccgccgccggcgccggggactggtacaaccaggagctggacctcaccctgcagcagcggatgcgctgggtgcagcgcaagtacatgatctacaactactgcaccgaccccaagcgctaccagcagggcctccccgccgagtgctccatgcag

SEQ ID NO: 723 - DNA, 1407 bp, Zea mays
atgggcgcctccaccacgccgctcgcgtcggcggcggcgctgcttctgctgctgctcgcgccgctcgccgcggcggcggacagcatgtcgatcgtctcctacggcgagcggagcgaggaggaggcgcggcggatgtacgccgagtggatggcggcgcacggccggacctacaacgccgtcggcgaggaggagcgcaggttcgaggtgttcagggacaacctccgctacgtcgacgcccacaacgccgccgccgacgcgggcgtccactccttccgcctcgggctcaaccgcttcgccgacctcaccaacgacgagtaccgcgccacctacctcggcgtcaggagcaggccgcagagggagaggaggctcggtgacaggtacctggccggcgacaacgaggacctgccggagtccgtcgactggcgggccaagggcgccgtcgcggaggtcaaggaccagggcagctgcgggagttgctgggctttctcaacaatagcggctgtggaaggcatcaaccagattgttactggcgacatgatctccttgtctgagcaggagcttgttgactgtgacacttcatacaaccaggggtgcaatggaggtttgatggactatgcgtttgagttcatcatcaacaacggcggaatcgacaccgaggaggattacccttacaagggcacggacggacggtgtgatgtcaacaggaaaaacgccaaggttgttactatcgacagctatgaagatgtaccagcgaacagtgagaaaagtctgcagaaggcagttgcgaaccagcccatcagtgttgcaattgaggctggtggcagagcatttcagctctacaactcgggtatcttcacaggaacctgtggaacagcgttggaccatggtgtcacggccgtcggctacggcacagagaacggcaaggactactggatcgtgaagaactcttggggcagcagctggggcgagtccggctacgtcaggatggagcgcaacatcaaggcgtccagcggcaagtgtggtatcgccgttgagccgtcgtaccctctgaagaagggcgccaaccccccgaaccctgggccgaccccgccttcccccaccccgccgcccaccgtctgcgacaactactactcgtgccccgacagcaccacctgctgctgcatctatgagtacggcaagtactgcttcgcctggggctgctgcccgctcgagggcgccacctgctgcgacgaccactacagctgctgcccccatgactaccccgtctgcaacgtcaagcagggaacctgcctcatgggcaaggacagcccactgtcactgtcagtgaaggctacgaagcgcaccctggccaagccgcactgggctttccctggcaacacagctgctgacggcatgaagagcagcgca

SEQ ID NO: 724 - DNA, 474 bp, Zea mays
atgtcgtcgcagctgatcgaggagcaccggtcgggcgcggaggtgcacgtcgggcacgagctgtgcgagcgcaagtcgcgcgagttcatggtggagctgggcctccccgacgggctcctcccgctgcccagcctggacgaggtgggctacaaccggtcgacggggttcgtgtggctgcggcaggccgccggcctgacccacaccttcggctccatcggcaagcaggtgtggtacgacagggaggtgacggcgttcgtggagcccgggcggatgcacggcctcgccggggtgaagagcaaggagctcctcatctgggtcaccatctccgagatcgtcctcagcccctccggcaccaagatcgtgttccgcacccccgcggggctcgggcgcgccttccctgtcaccgccttccagctcgagcccgagggggaccacaaggccgaggacgccgccgccgccgccgccgccgccaac

SEQ ID NO: 725 - DNA, 930 bp, Zea mays
atggcggcgggcgtggacggctacggctgcgacgagttccgcatgtacgagttcaaggtccggcggtgcgcgcgcgcgcgcagccacgactggaccgagtgccccttcgcgcacccgggggagaaggcgcggcgccgcgacccgcgcaagtaccactactccggcgccgcctgcccggacttccgcaagggcgggtgcaagcgcggcgacggctgcgacatggcgcacggcgtcttcgagtgctggctccacccggcgcgctaccgcacccagccctgcaaggacggcacggcctgccgccgccgggtctgcttcttcgcgcacaccgcggaccagctgcgcgtgctcccgcccacgcctcagcagcagtccagccccaggggcgccgcctgctcttccccgctcgccgagtcctacgacggctccccgctccggcgccaggcgttcgagagctacctcaccaagagcatcatgtgctcgtcgccgaccagcaccctcctgtcgccgcccaagtcgcccccgtcggagtccccgccattgtcgcccgacttccgccgtgggtgctggccgggcgccgggtcccccgtcaacgacgtgctcgcctcgctccgccagctccgcctcagcagggccaactcgtccccgtcgggcggctggtgcggctaccctgcatccgcggtcgcgtacggatcgcctacggggggcgcgctctacggcctgtcctccaccccgagggccaccgccgcatcctgctacatggccaacctggaccctctcgacgtcagcttcggcggcgacgacgagcccgtggagagggtggagtccggccgcgccctccgcgcgaaggtgttcgagcggcttagcagggagggcgctgtttccggcgacgccggtggccccgacgtcggttgggtctccgacctcatcaac

SEQ ID NO: 726 - DNA, 492 bp, Zea mays
atggacgcggtgatgttcgggctggagactcccctgatggccgcgctgcagcacctgctggacgtgcccgacggcgacgccggcgcgggcggcgacaacaagacgggcagcggcggcagcgccacgcgcacctacgtccgcgacgcgcgcgccatggcggccaccccggccgacgtgaaggagctgcccggcgcgtacgcgttcgtggtggacatgccggggctgggcacgggcgacatccgggtgcaggtggaggacgagcgggtgctggtggtcagcggcgagcggcgccgggaggagcgcgaggacgacgccaagtacctgcgcatggagcggcggatgggcaagttcatgcgcaagttcgtgctgccggacaacgccgacgtcgacaaggtcgccgccgtgtgcagggacggcgtgctcacggtgaccgtcgagaagctgcccccgccggagcccaagaagcccaagaccatcgaggtcaaggtcgcc

SEQ ID NO: 727 - DNA, 1356 bp, Zea mays
atggcttggtcttgtgctcgtccgatgagcatcgccctcgctgccgtcctcctgctgtgcggcggcgcgtggctgcagcaggcggcggaggcgcgcccccaccacatggacgacgacagcagcatcgacatggaccgcggcagcgacgacttcttctccatcgtggggtactcgccggaggacctgacgcagcacgaccggctcgtcaggctgttcgaggagtgggtggccaagtaccgcaaggcgtacggcagcttcgaggagaagctgcgccggttcgaggtgttcaaggacaacctgcaccacatcgacgaggccaacaggaaggaggtcaccagctactggctgggcctcaacgccttcgccgacctcacgcacgacgagttcaaggccacctacctgggcctcctgccgaagaggaccagcggtggccggttcaggtacggcggcgtgggcgacggcggcgacgaggtgcccgcgtccgtggactggcggaagaagggcgccgtgacggaggtcaagaaccaggggcagtgcggcagctgctgggccttctccacggtggcggccgtggaagggatcaaccagatcgtgacgggcaacctcacgtcgctgtcggagcagcagctggtcgactgcagcaccgacgggaacaacgggtgcagcggcggcgtcatggacaacgccttctcgttcatcgcccacccgggcgccgggctcccgctccgaggaggcgtacccgtacctcatggaggaaggggactgcgacgacagggcccgcgacggcgaggtgctcgtcactatatccgggtacgaggacgcgccggccaacgacgagcaggcgctcgtcaaggccctcgcccaccagcccgtcagcgtcgccatcgaggcgtccgggaggcacttccagttctacagcgggggcgtgttcgatggaccgtgcgggtcggagctggaccacggcgtggcggcggtgggctacggcagcagcaaggggcaggactacatcatcgtcaagaactcgtggggcacccactggggcgagaagggctacatccgcatgaagaggggcaccggcaagccggagggcctctgcggcatcaacaagatggcatcctacccgaccaaggaccattgatggatcatggacgacggagatcatatctatcttcccttccctttcatccgactctttcgatttccatcgtttgcccccttttcctgaatgtgtgtgtttttttttatatattactgtgtcaagtaatttctcgatggatcgatcgaggaagaacgacaaacatgcactcaagcacgagcgcagcaatgtcatctttctcttcatttggtgcgttgaaa

SEQ ID NO: 728 - DNA, 693 bp, Zea mays
atgctccgcaagcacacctacttcgacgagctcgcgcagaacaagcgcgccttcgccgccgcgtccgcgtccgcggccaccgcctcgtcgctggccaacaacccttcttcctacgcgtcgctctcccccgcgaccgcgacggccgccgcgcgggagcacctcttcgacaagacggtcacccccagcgacgtgggcaagctgaaccggctggtgatcccgaagcagcacgccgagaagcacttcccgctgcagctcccatccgccggcggcgagagcaagggcgtgctcctcaacctggaggacgccgcgggcaaggtgtggcggttccgctactcgtactggaacagcagccagagctacgtgctcaccaagggctggagccgcttcgtcaaggagaagggcctccaagccggcgacgtcgtcggcttctaccgctccgctgccggcgccgacaccaagctcttcatcgactgcaagctgcggcccaacagcgtcgtcgtcgcctcgacggcaggcccgtcgcctccggcgccggtggcgaaggccgtgcgtctcttcggcgtcgacctgctgacggcaccggccaccgccgcggcgccggcggaggccgtggccgggtgcaagagagccagggacttgggttcgcccccgcaggcggcgttcaagaagcagctcgtggagctggcactagtg

SEQ ID NO: 729 - DNA, 912 bp, Zea mays
atggaagccagcagcaagaagctccaggcgttcatcctcacgctgctgctggtgctctccaccgccgtgactcccatcctctcgctgtcagtgccagacgacgaggtagcctgcgactgcgataaacccaaggcgcccaagccgtcgcacccgcccaagaccaagccctcccacccgtcgccgtcgccgaagcccaagaatcccaagccacccaagggcagcaccgggtacccagcgccggggcaccaaccgcccaagagcccctcctaccccccggtcgtcggccctcccaagggccccgtcacgcgcccgccagtcatgcgtccgccggtcgtcggtcctcccaagggccccgtcacgcgcccgccggtcacgcgtccgccggttgtcggaccaccggtgacctacccgccgatcaccggccctccgacgacgccgcctgttgtcggaccaccggtgacctacccgccgatcaccggccctccaacaacgccgcctgttgtcggcccaccggtgacctacccaccgatcactggcccgcctgcgacgacgcccccggtcaccggtccgcccgtgacctaccctcccggcggaggcgggggaagctcgacgccgtgcccgccgccaccgagcccgacgccgacgccgtcgtcgcctacgtgcccggctgactcgctgaagctgggcgcgtgcgtggacctgctgggcgggctggtgcatatcggcctcggcgaccccgtggtgaacaagtgctgcccggtgctggaggggctggtggagctggaggcggccgtgtgcctctgcaccaccatcaagctcaggctcctcaacatcaacctctacctgccactggcgctccagctcctcctcacctgcggcaagacgccgccgccgggctacacctgcaccgtc

SEQ ID NO: 730 - DNA, 135 bp, Zea mays
atgcctcgcactccactgacccacagagagcgccgccgccgcgcgcgaaggcgaagcctgggcgccgcaagaaccagtaccgcgggatccggcagcggccgtggggcaagtgggcggcggagatccgcgaccccg

SEQ ID NO: 731 - DNA, 603 bp, Zea mays
atggagaacgtgcacgcggcgctggcggcggccgggctgggccacatcaaggtgacgacgtcggtgtcgcaggccatcctgggcgtgtacagcccgccgtccgccgcggagttcaccggcgaggcgcgcgggtacatgggccccgtgctgcagttcctggcccgcaccgggtcgccgctcatggccaacatctacccgtacctggcctgggcatacaaccccagcgccatggacatgagctacgcgctcttcacctcctccggcaccgtcgtgcaggacggcgcctacgggtaccagaacctcttcgacaccaccgtcgacgccttctacgtcgccatgggcaagaacggcggctccggcgtgccgctcgtggtgtcggagagcgggtggccgtccggcggcggcgtccaggccacgccggccaacgcgagggtgtacaaccagtacctcatcaaccacgtcgggcgcgggacgccgcgccaccccggcgccatcgagacctacctcttctccatgttcaacgagaaccagaaggagagcggcgtggagcagaactgggggctcttctaccccaacatgcagcacgtctaccccatcagcttc

SEQ ID NO: 732 - DNA, 1221 bp, Zea mays
atggtcaaccacttcgtccaggagttcaagaggaagaacaagaaggatatcactggcaaccccagggctctccggaggctgaggaccgcttgtgagagggcgaagaggactctgtcttccactgcccagaccacgattgagattgactcgctgtatgagggcatcgacttctactccaccatcacccgtgccaggtttgaggagctcaacatggacctgttcaggaagtgcatggagcctgttgagaagtgcctgagggatgccaagatggacaagagcaccgtccatgacgttgtacttgttggtggctccactaggatccccagggtgcagcaactgctccaggacttcttcaacggcaaggagctgtgcaagaacatcaaccccgatgaggctgtcgcctatggtgctgctgtccaggctgccatcctgagcggtgagggcaatgagaaggtgcaggacctgcttctgctggacgtcacccctctgtccctgggtctggagactgctggaggagttatgacagtgctgatcccgaggaacaccaccatccccaccaagaaggagcaggtattctccacctactcggacaaccagcccggtgtcctgatccaggtctacgagggtgagaggacccggacacgcgacaacaacctgctgggcaagttcgagctctccggcatcccccctgcaccccgtggtgtgccacagatcaccgtgtgctttgacatcgacgccaacggcatcctgaacgtgtctgccgaggacaagacaacggggcagaagaacaagatcacaatcaccaacgacaagggccgtctctccaaggaggagatcgagaagatggttcaggacgctgagaagtacaagtctgaggatgaggagcacaagaagaaggtggaggccaagaactcgctggagaactactcctacaacatgcgcaacacgatcaaggacgagaagattgcgtccaagctgccggccgatgacaagaagaagatcgaggacgccatcgacgcggccatcagctggctggacgccaaccagctcgccgaggcggacgagttcgaggacaagatgaaggagctggagagcctctgcaaccccatcatcgccaagatgtaccagggcgcgggtgaagacatgggcggcgctggcggcatggacgaggacgcccctgccggcagcggcggccctggccccaagatcgaggaggtggac

SEQ ID NO: 733 - DNA, 657 bp, Zea mays
atgtttgttgttcgtcgtcatcatcattatacatccttagccaccaccagacccgtacttcttgccgaagacaaccacctggagcttgtcgtacccagcaaggacaccagcaccagctacagcgcggaggatgtttgcgccagcacccttgaagagggacttggtaccctcctttgcgacaatctgcttgaaagcgtccaaggagctgttgtacttgacggcctcaccagatgtcatcatcatgcgacggcgaacagtgtcaatggggtaggaggcaaggccagcaccaatggttataccccacccgagcaagaagctggccaagaagttatcctgcagggtaccaacaagaagcactggcttcagggaatcatacataccaaagtaaagacctcggtacacaatgatccccacacaagagatattgaatccacggtagaggccacgaataccatcactggcaagggtcttgcggtaaacatcaacgagtccattgaactgcctctcaccacccttctttgcagccttggcatcattggccaaacgcgtacgggcgtagtcccagagaatagccaaagaatagagagcaagcaccagcagctccaccagaagccagatttccagcaaaccacttccagtacccatccttgtccttct

SEQ ID NO: 734 - DNA, 639 bp, Zea mays
atgttctacgcgccggtgctgttcaacacgctggggttcaagagcgacgcgtcgctctactcggccgtcatcacgggcgccgtcaacgtcctctccacgctcgtctccgtctactccgtcgaccgcgtcggccgccggatgctgctgctggaggccggcgtgcagatgttcctgtcgcaggtggccatcgccatcgtgctgggcatcaaggtcaccgaccactccgacaacctgggccacggctgggccatcatggtcgtcgtcatggtctgcaccttcgtctcctccttcgcctggtcctgggggcccctgggctggctcatccccagcgagaccttcccgctggagaccaggtcggcggggcagagcgtcaccgtctgcgtcaacctgctcttcaccttcgtcatcgcgcaggccttcctctccatgctctgccacctcaagtacgccatcttcgtcttcttctccgcctgggtcctcgtcatgtcgctcttcgtcctcttcttcctgccggagaccaagaacgtgcccatcgaggagatgaccgagagggtgtggaagcagcactggttctggaagcgctacatggacgacgacaaccaccacatcgtcaacggcaagctcaccggcgcctccgtt

SEQ ID NO: 735 - DNA, 450 bp, Zea mays
atgaccgtcgtcgacgccgtcgtctcctccaccgatgccggcgcccctgctgccgccgccaccgcggtaccggcggggaacgggcagaccgtgtgcgtgaccggcgcggccgggtacatcgcctcgtggttggtgaagctgctgctcgagaagggatacactgtgaagggcaccgtcaggaacccagatgacccgaagaacgcgcacctcaaggcgctggacggcgccgccgagcggctgatcctctgcaaggccgatctgctggactacgacgccatctgccgcgccgtgcagggctgccagggcgtcttccacaccgcctcccccgtcaccgacgacccggagcaaatggtggagccggcggtgcgcggcaccgaagtacgtgatcaacgcggcgggcggaggccggcacggtgcggcgggtggtgttcacgtcgtccatcggcgccg

SEQ ID NO: 736 - DNA, 1017 bp, Zea mays
atggcgaggcaacgacaagttgcttccatgcttgcagctgctctgctcgttgcaacgacgtttgcgtccattcctacaaccgtgcactccatcggcgtctgctacggcacgctgggcaacaacctgccgtccagcagcgacgtggtgcagctctacaggtccaagggcatcaaaggcatgcgcatctactcccccgacgccaaagccctcgccgccctgcgcaactccggcatcgcgctcatcctcgacaccggcaacggcggcggcgtcctgggccagctcgccaggagcgcctcgttcgcggactcgtgggtgcagagcaacgtgcggccctactaccccgccgtcggcatcaagtacgtcgcggtgggcaacgaggtgcagggcgacgacacgcgcagcctcctcccggcgatgcgcaacctggacgccgccctggcgcgcgccggcttcccgggcatcaagtgctccacgtcggtgcgcttcgacgtggtcgccaactcgttcccgccctccagcggctccttcgcgcagggctacatggcggacgtcgcgcgctacctggccggcaccggcgcgccgctgctcgccaacgtgtacccttacttcgcgtaccgggacaacccgcgcgacatcagcctgggctacgccacgttccagccgggcaccaccgtcagggacaacggcaacggcctcaactacaacaacctgttcgacgccatggtggacgccgtcgtcgccgcgctcgagaaggccggcgcgcccaacgtcagggtcgtcgtgtccgagagcggctggccctcggccggcggcttcggggccagcgtcgacaacgcgcggaaatacaaccagggactcatcgaccacgtcggccgcggcacgcccaagaggaccggcccgctggagaccttcgtcttcgccatgttcaacgagaaccagaagggcggcgatcccacggagaagaacttcggcctcttctacggcaacaagcagcccgtgtacccgatccggttcaac

SEQ ID NO: 737 - DNA, 546 bp, Zea mays
atgctcggcggccactaccgccgggactcccgcgtcgtcatcgacgaggccatcgcctacgccgagggcctcaagctgggcggcaacggcaaggaggtctgggtcttcgatatcgacgagacgtccctctccaatctcccctactatgccacccacggcttcggcactaagctatacaacgcgacgagcttcaacgagtacgtgctggaggggagcgcgccggtgctcccggagacgcagcggctgttcaagaagctcgtctcgctgggcatcaagccggtgttcctgacgggccgcaccgaggaccagagggccatcaccgtcaccaacctccgccgccaggggtactccggctggatgacgctgctgctcaagcccgtcggcctcaaggccaccgccatcgcctacaagtccggcgagcgccagaagctccaggacgccgggtacgtcatcgtcggcaacatcggcgaccagtggagcgacatcctcggcgcgccggagggcgcgcgcaccttcaagctgcctgaccccctctactacattggc

SEQ ID NO: 738 - DNA, 846 bp, Zea mays
atggtgaaacacccgtcggcgctggccatgttcgaccagctggtagcggcgtccaaggggaagcagatcgtcgtgttcctcgactacgacggcacgctgtcccccatcgtcgacgaccccgacgccgcctacatgtccgacacgatgcggcgggcggtgcggagcgtcgccaagcacttcccgacggcgatcgtgagcgggcggtgccgcgacaaggtgttcgaattcgtgaagctggcagagctgtactacgccggcagccacggcatggacatcaagggccccgccaaagggtcccggcacaccaaggccaaaggaggcggcgttctctttcagccggccagccagttcctgcccatgatagagcaggtgcacgattctctggtggaaaagaccaagtgcatacctggagccaaggtggagaacaacaagttctgtgtgtctgtccacttcagatgcgtcgatgagaagagctggatcacgttggcggatatggtgaagtcggtgctcaaggactacccgaagctgaagctgacgcagggcaggatggtgttcgaggtccgccccaccatcaagtgggacaagggcaaggccctggagttcctccctcgagtccctcgggtacgccgactgcaccgacgtgctgcccgtgtacatcggcgacgaccgcaccgacgaggacgccttcaaggtgctccgcaagcgcgggcagggcgtgggcatcctcgtgtccaagcacccaaggacacctgcgcctcctactcgctgcaggagcccgccgaggtgatggagttcctgctgcggcttgtcgagtgggagcgcctctccaaggcccgccccaagtgg

SEQ ID NO: 739 - DNA, 207 bp, Zea mays
atgcagctcaaacaggccaactcggcgcagtggcgagacatgcagcacgtctggggggccacgtggagcctcaccccgggcccgctcgtcgggcccttctccgtgcggctgacgaccctgtcgggcaagcagacgctcacggcccaggacgtcatccccaagaactgggcccccaaggccacctacacctcccgcctcaacttcgcg

SEQ ID NO: 740 - DNA, 1134 bp, Zea mays
atgggcgctctgttccacgcgctgcccgcgcacgtcgagcagctgctccgccgcgtcgtcgtcgaacccagagccacgttcctcgtcgccgacaccttcttcgtgtggcccgccactctggccaggcgcctcggcatcgcgtatgtgtcgttctggaccgagccggcgctcatcttcaacctctactaccacatcgacttgctcacccagaacggacactttagatgcaacgagcctcgcaaggacacgatcacctacatcccgggcgtggcggccatcgagccgagcgagctcatgtcgtacctgcaggagacggacaccacctccatcgtccaccgcatcatcttcaaggcgttcgacgaggcccgcggcgccgactacgtgctctgcaacaccgtggaggagctggagccgtcgaccatcgcggcgctgcgcgcctacaggcccttctacgccgtggggcccatcctcccggcgggcttcgcgcgcagcgccgtggccacgtccatgtgggcggagtccgactgctcccggtggctggacgcgcagccggtcgggtccgtgctctacatctccttcggcagctacgcgcacgtgaccaagcaggagctgcgcgagatcgcgggcggcgtgctggccagcggcgcccggttcctgtgggtgatgcgcccggacatcgtgagctccgacgacccggacccgctgcccgaggggttcgccgaggccgcggcggggcgcggcctggtggtccagtggtgctgccaggtggaggtgctctcccacgccgccgtcggcgccttcctcacgcactgcggctggaactccgtcctcgagagcgtgtgggcgggcgtgcccatgctgtgcttcccgctgctcacggaccagctcaccaaccgccgcctcgtcgcgcgggagtggcgtgccggcgtgtccgtcggagaccgcggcgcggtgcgcgccgacgaggtgagggcgcggattgaagcggtcatgggcggggaagacggcctcaagctcagggagcaggtgaagaagctcaggggcacactcgaggctgccgtggcgtccggtggttcgtcgcggcacaacttcgacgagttcgtcgaggagctgaagcgccggtgcggaggccgc

SEQ ID NO: 741 - DNA, 1062 bp, Zea mays
atgaggaacaggaagcaagaaatcgtcgggggggcagggcagggcactgtgtgggacggacggcgaccgcgcgaacggatcggggataacaaacaaaccaatgaatcagttgcgggagcactcggcggggaagccctgcgggaagcgccagccgtcgtcgcagtagttgtagtgcatgtagttctgcctggcccaggcgacggtgccccactcggcggcgtcgagctggcggctcatccagcggtcggtgccggcggggcaggagagcgggcggccgtcgccgtcgggcacgcaggcgtcggcggagtagccgcggtaggagacggcgaagggcgcggcggaccagtccaccttcaccttcccctgctgcgtggcccagtagctgccgtcccacagcgtggcgtgcaccgacatgggcttcccgcccgggtacgccaggtccgggtaccgcttgaagcaccgcacgaagaggtcgtccaccttgaagatgacgttcttgtcgttccagatgatggtgtaggtgtggaagtcggcggccgggtcgaaccacaggtagaactggtgctccttcttgccgtcgccgttggcccacacgttggtgttcagcaccacgggctgcccgctggcgttgcccatgaactccatgtcgatctcgtcgtgcccgggcccgtcgcccgacgacaggtagaaggaggtcacggtgcccgcggagttgcccgggatcagcctcatctggatgctgaactccccgtacaggtacttctgccgcgagctgaaggcgccgccggactgctgcgtcaggatcagagacgtcacctgctgcccctgcgcgttgtagtccgcgcgcacgttgccctccgtcgtgaacttctcgtacagccacgagtccgccgacgccgcggcggccaggagagccagagcgaggagcaaggacacggaacgccgcgccatgcggtccatgctcatgccagtgctctgcttcgcttgtcggagatgagatgggatgggatgagaggagaggaggcggctagctgtaggccagtagctgactggctagtggag

SEQ ID NO: 742 - DNA, 573 bp, Zea mays
atgatgatagccgagctggccgccgccggtggccatcaaggccccggaacccgccgccgcagcagcagcagcagctcggctggcggcgccgcggcccacgggcacgtcgtggttgtgcttgccctcgtacgtggtgatcacggcgcgcttgtcgtgggacgcgcgctccacgtgcttccgcaccgggcaccccgccgtggtgcacttgtagtagctccgcgggttcgggttccccttcaccaccttctgcccgtacttgcgccaccggaacccgtcgtccaggatgtcgatgtcgctcatcgtctggaccaccagccggggctcgcggaccggcttgccgccgccgcctgcagagctgccctcgttctcgccgtcctcctgcttccagcgcttggcgtcgggctcgtcgccgtcgctccgctgcgacccgttctctgcctcgtcgtcgccgaaggtgacagacgagttctcggcggtggcgccggagtgctccggtccagtacagccggccgccgctacggccgagaggctgctgttgccggcctgcagctcctccgccgcaccgccgccgga

SEQ ID NO: 743 - DNA, 981 bp, Zea mays
atggagaccatcgcgcgcaccaagacgtcccgcgccgaggcggacgccgactcggacatgtcgcccgaggcgcacgaattcaagcagatcgtcgacgagatcgtgccgcacctcggcacggccaacctgtgggactacctgccggtgctgcggtggctcgacgtgttcggcgtgaggaacaagatcacggccgctgtgggcaggagggacgcgttcctgcggcggctcatcgacgcggagcggcggaggctggacgacggcggcggcgacagcgacagcgacaagaagagcatgatagccgtgctgctctcgttgcagaagtcagagccggaggtgtacacggataccatgatcatggcactttgcgggaacttatttggcgccggaacggagaccacgtcgaccacgacagaatgggccatgtcgctcctcctgaaccacccggaggcgctgaagaaggcacaggcagagatcgacgcagtcgtgggcacctcccgcctactcgccgcagaggacgtgccccgactcggctacctgcaccgcgtcatcagcgagaccctgcgcatgtacccggccgccccgctgctcctgccgcacgagtcgtcggcggactgcaaggtcggcggctacgacgtggcccgcggcacgctgctcatcgtgaacgcgtacgccatccacagggacccgctggtgtgggaggacccggacgagttcaggccggagcggttcgaggacggcaaggccgaggggcggctcctgatgccgttcgggatggggcggcgcaagtgccctggggagaccctcgcgctgcggaccatcagcctggtgctcggcacgctgatccagtgcttcgactgggaccgagtcgacggcctcgagatcgacatggccgcgggcggcgggctcactctgcccagggccgtcccgttggaggccacgtgcaagcctcgtgcagctgtgcgccatcttcttctggagctc

SEQ ID NO: 744 - DNA, 477 bp, Zea mays
atggcggacctcaacggcgcgtgccccgccgacctgcgcgtggcggcttcgacgacgtcctccggcggcggcggcgtggcctgcaagagcgcgtgcgaggcgttcgggtcggcgcagtactgctgcaacggcgactacgggaaccccagcacctgcaagccgtcggcgtactcgcagttcttcaagaacgcgtgcccccgggcgtacagctacgcctacgacgacgccacctccaccttcacctgcgccggcgacaccgcctacgccatcaccttctgccccagcacgaccagcgtcaaggcggccggaggtagcccgcaggcgcaaggagccctgccgctgatgaacgccaccatggtgtacctcggcggcgaccaggtcggatccgccacagccgcggcccggctgccgagcggcctcctccaccacgtcgtggtcctcgccgttgtgtccctcgcgctagcaggggctctgtac

SEQ ID NO: 745 - DNA, 669 bp, Zea mays
atggctacgccggcggtgaaggtttacgggtgggctatctcgccgttcgtatcgcgggctctgctggccctggaggaggccggcgtcgactacgagctcgtccccatgagccgccaggacggcgaccaccgccgcccggagcacctcgccaggaaccctttcgggaaggtgccggtgctcgaggatggcgacctcacgctcttcgaatcacgtgcgatcgcgaggcatgttctccggaagcacaagccggagctgctgggcggcggcaggctggagcagacggcgatggtggacgtgtggctggaggtggaggcccaccagctgagcccgccggcgatcgccatcgtggtggagtgcgtgttcgcgccgttcctgggccgcgagcgcaaccaggcggtggtggacgagaacgtggagaagctcaagaaggtgctggaggtgtacgaggcgcggctggccacgtgcacgtacctcgccggcgacttcctcagcctcgccgacctcagccccttcaccatcatgcactgcctcatggccaccgagtacgccgctctcgtccatgcgctcccgcacgtcagcgcctggtggcagggcctcgccgcgcgcccggcggccaacaaggtggcgcagttcatgccggtcggcgccggagcgcccaaggaacaggag

SEQ ID NO: 746 - DNA, 1287 bp, Zea mays
atgaggaagccagaagaaatcacaaaagaagaatatgctgccttctataagagcttgacaaatgactgggaggagcatctggctgtgaagcacttctctgtggagggtcaactggagttcaaggctgttctctttgttcctaagagggccccctttgatctctttgacaccaagaagaagcaaaacaacatcaagctctatgtgcgcagggtgttcatcatggacaactgcgaagagctgatccctgagtggctgagcttcgttaagggtattgttgactctgaggaccttcccctcaatatctctcgtgagactcttcagcagaacaagatcctgaaggtgatcaggaagaaccttgtgaagaagtgtgttgagctcttctttgagattgctgagaacaaggaggactacaacaagttttacgaggctttctccaagaacctcaagcttggcatccacgaggactcgcagaacaggaccaagatcgccgagcttctgagataccactccaccaagagtggtgatgagctgaccagcctcaaggactacgtgaccaggatgaaggagggacagaatgacatatactatatcactggtgagagcaagaaggcagtggagaactcccccttccttgagaagctgaagaagaggggctatgaggttctgtacatggttgatgccattgacgagtatgctgttggtcagctcaaggagtttgagggcaagaagcttgtctctgccaccaaggagggtctgaagcttgatgagactgaggacgagaagaagaggaaggaggagctgaaggagaagtttgaggggctgtgcaaggtcatcaaggaggttctgggtgacaaagttgagaaggtggtggtgtctgatcgcgttgtggactcaccgtgctgccttgtgactggcgagtatggctggaccgccaacatggagaggatcatgaaggcacaggccctgagggactcgagcatggcgggctacatgtcgagcaaaaagacaatggagatcaacccagagaaccctatcatggatgagctccgcaagcgtgccgaggctgacaagaatgacaagtcagtcaaggatctcgtgatgctgctgttcgagactgctctcctgacctccggcttcagcctggatgaccccaacaccttcggcaaccggatccaccgcatgctcaaactcggtctgagcatcgatgaggacgagcctgttgaggcagaggctgagatgcctcagcttgaggacgacgctggtgaaagcaagatggaggaggtcgac

SEQ ID NO: 747 - DNA, 474 bp, Zea mays
atgcccgtacggttcaggacctttggcgccgaacgcgggaccgcagcgccgggagttttcgcgtcggtaggcggcagtgtggcgttcgcaagcaacggcgctaggagggccgagggtgccagcggccccaatgacaccgcccgccgcggcccgcccagcaggttgacggcgtcgcgcgctgcgagggcgaggatgtcggcgcaggagacggtggccttgcaggacgcctccacctgggccttgatggcgtcgatgacctcgtacccgcgcagcgagttggcgttgggccccgcgttcttctccccggtgaagttaccgggcacgtcgtccagcaagacggaggcgtcgcagccattgacgaagcagtcgtggaagaagaggcggaggagggacgcccccatgcgcggctccgcccggacggcgcgcgccacgccgcggcgcacgatgggctgcagccccgggcacgtcgcgtcg

SEQ ID NO: 748 - DNA, 747 bp, Zea mays
atggcggcggcggcgagacagcgggggacggtgaagtggttcaacgacaccaagggcttcgggttcatctcccccgaggacggcagcgaagatctcttcgtgcaccagtcgtcgatcaagtcggagggcttccgctcgctcgcggagggcgaggaggtggagttttccgtctcggagggtgacgacggccgcactaaggccgtcgacgtgaccggccccgacggatccttcgtcaggggcggcggaggcggaggaggaggcggcggcggctacggctcccgcggcggtggcggatctggcggcggcggtcgcagctacggtggtagctggggcggcggccggagatccggcggcgggggcggtcccggcgcgtgctacaagtgcggcgagcccggccacatggcaagggactgccctagcgccgacggcggaggcggctacggcggaggcggctacggcggcggcggctacggaggaggaggcggcggcggcggtggctgcttcaagtgtggcgagcctggccacatggccagggactgctccagcggcggcggcggctacggcggtggcggcggcggcggtggaggcggctgctacaactgcggccaggccggccacatggccagggactgccccagcggtggcggcggtggcggagggaggttcggcggcggcggcgggggtggcggcgaccgctcctgctacaactgcggcgaggccggccacatcgcccgcgactgccccacg

SEQ ID NO: 749 - DNA, 717 bp, Zea mays
atggacacccatatcggatccgtgaacggggcggcgtcgaaccagacggttggctgcccggcgtcggcgccggggtgcccgatggcgtccacgccggcgcagcccgcggcgaccctgtcggcgggggaggcgtcgctggggcgccacctcgcgcgtcgcctcgtgcaggtcggcgtcaacgatgtattcgcggttccgggggacttcaacctcacgctgctcgaccacctgatcgccgagcccggcctgcgcctcgtcggctgctgcaacgagctcaacgccgggtacgccgccgacgggtacgcgcgcgcgcgcggcgtcggggcctgcgccgtcacgttcacagtcggggggctcagcgtgctcaacgccatcgcgggcgcctacagcgagaacctgcccgtcatctgcatcgccggcgggcccaactccaacgactacgggaccaaccgcatcctccaccacaccatcggcctccccgacttctcgcaggagctccgctgcttccagaccgtcacctgccatcaggcggtggtgaacaatctggatgacgcgcacgagcagatcgacacggccattgccacgggcactgagggagagcagcccgtgtacctcagcatcagctgcaaacctcctgggctgcctcatcctacctttcgccgcgaaccagtgctctttcttcctcccccccaggacgaagcaacaaaattgggtcta

SEQ ID NO: 750 - DNA, 720 bp, Zea mays
atgatgaaagagttcttgtctgaattggctaagagggttaataagaacaccactgcctatgagaattacaagaggatctttgtacctgagggccagccgctggaaagcgagccaaatgagccactgcgagtgaatgtgctcttcaagcacgtccagaagatgttgactggtgatagcgcggtgattgctgagactggtgactcctggttcaactgccagaagcttaagctgccagaaggctgtgggtatgaattccaaatgcagtatggttcgattggatggtcagtgggtgcattgctcggatatgctcagggtgcgaaccacaagcgtgtgattgccttcattggtgatgggagcttccaggttacagcacaggatgtgtcaactatgctgcgatgtgagcagaacagcataatcttcctgatcaacaacggtgggtacacgattgaggtggaaatccatgacgggccatacaacgtcatcaagaactggaactacactggctttgtggacgccatccacaatggcttgggcaagtgctggacctccaaggtgaagagcgaggaggagctgacggctgccattgagacagcgctaggggagaagaaggactgcctgtgcttcatcgaggtgatcgcgcacaaggacgacaccagcaaagagctgctggaatggggctctagggtttctgccgccaactcccggccaccaaatcctcag

SEQ ID NO: 751 - DNA, 498 bp, Zea mays
atggcgccgctcgtctcgtacctgtcgtccaggggcgcgccgctgctggtgaacgtgtacccgtacttcgcctactcgggcagcggcgggcaggtggcgctcgggtacgcgctgctgtcgggcgccggcgccggcgccgcgtcgacggtgacggacggcggggcggtgtacactaacatgttcgacgcgatcgtggacgcgacgcacgcggcggtggagaaggccggggtgcaggggctggagctggtggtgtcggagaccggctggccgtcggccggcggcgagggcgccagcgtggagaacgcggcggcgtacaacaacaacgtggtgcggcacgtcgacggcggcacccctcggcggcccgggaaggccctggagacctacctgttcgccatgttcaacgagaacggcaaggccgagggcgtggagcagcacttcggcctcttccagccggacatgagcgaggtctaccacgtcgacttcacggcgggatccccc

SEQ ID NO: 752 - DNA, 468 bp, Zea mays
atgctggacttgcaagctttattcctgatgctgaattccaggcagcagaacaaagtgccggatacactgccccagaaagtggacatgaccggtcagtacacctcaaagagtgatgtctacagctttggagttgtcatgcttgaactattgacaggacgtagaccatttgacagctctagacccaggtcagagcagtcacttgtgcggtgggcaacaccccagctgcatgacatcgacgcattggacaggatggtcgatcctgcactcaagggtctatacccagccaaatctctatcccgatttgctgatgtccttgccctgtgtgtccagcctgaaccagaattcaggccaccaatgtcagaggtggtgcaagcattggttcgacttgtgcagagggccaacatgacgaagaggatgcttgatggggatacttctcggcgaccagatgacctggaccaagatttcata

SEQ ID NO: 753 - DNA, 444 bp, Zea mays
atgagggctcggcggagaccctgcgccgcttgccgccgccgccgccagtggcggcgcggcgcgaggcgccgccgacggggacgtcgcgcagcgtgcccccgtgcgtccagtagcggcggcacgcgcggcagaagtggcgcggctgcgccgtgctgtagttgttgtagtagcagaacttggtgttggtggagcggcagcgcgggcactcaagctgctgctgctgccgcggttgctggccctggccctgcacctgctggtggggcgcggaggagtcgtcgtgcgggagctcatcagcgtcggaagtggcggggcgctttcgcttggcggaggcggtggccgagaggatggaaactgcaggcgccatctcgcaggcgagcagaaccgcgcatgccgaggacgagcggcggcgggttaatagacgtccggcgatgcggccgagagcgc

SEQ ID NO: 754 - DNA, 462 bp, Zea mays
atggacctgtctcccagctcgtcggcgccatccgcgccgccggtgccgtgcgagtggtccggcgccgggctcggctccgcggcgtgcggcctcgcctgcagggtgctctgcgccgtcgccacctgcgtcttcgcggccgtggggtcgctggtcggggcggtgacggggtccatggtggggctggcgaccgagagcgggatgctgcgcggcgccggcatcggggccatctccggcgccgtcttctccatcgaggtcgccgagtcgtcccgcgacctctggcactcgggcgactccggcgtctggaccctcctctacatggtggacatcatctccagtctcttgagcggcaggctggtccgggagaaggtggggcccggctgttcagaggcgccgtgcagagccagatcagcgccatcagctcgccgttcgaggagacgagcgacctgttcgagaccggcagcg

SEQ ID NO: 755 - DNA, 915 bp, Zea mays
atgtggtggtccaagttccacaagaaccagctcaagtacacgcgcggctacctcatcgagctgatgcactcggacaccatctacatctccaacctgacgctgctcaactcgccggcgtggaacatccacccagtctacagcagcaacatcgtggtgcaaggcatcaccatcctggcgccgaccaactcgcccaacaccgacggcatcaacccagactcctgctctcacgtccgcatcgaggactgctacatcgtgtcgggcgacgactgcgtggccatcaagagcggctgggacgagtacggcatctcgtacgggatgcccagccagcacatcgtcatccgccgcctcacgtgcgtgtccccgaccagcgccgtcatcgcgctgggcagcgagatgtcgggcggcatccaggacgtgcgcgccgaggacatcacggcgatcaacaccgagtccgccgtgcgcatcaagaccgccgtcggccgcggcgcctacgtcagggacgtgttcgcgcgccggatgacgctcaccaccatgaagcgggtgttctggatgacgggcgactacaagtcccacccggacgacaagtacgaccccaacgccgtccccgttgtcgccaacatcagctaccaggacgtggtggccacgggggtctacaaggaggcggcgcgcctccagggcatccagggcgcaccgttccggggcatctgcgtcgccaacgtcaccgccgacctgtccaagtccaggaagtacccatggaactgcgccgacatcgagggagtgtcggccaacgtcagccccgcgccgtgcgacccgctacagggcgcgcacgacggcgcatgcccgttcccgaccgacacgctgcccatcgaccaggtcacagtgcagcagtgcgcatacgacatcccggccaccaac

SEQ ID NO: 756 - DNA, 642 bp, Zea mays
atggcgaggatccacctctacgtcgtcgccgcggcctgcgccgtcgccctcgcgctcgccggcgacccggacatgctccaggacgtctgcgtggctgactacgcttccccggtcaagctgaacgggttcccgtgcaaggcgaacgtctcggcggacgacttcttcttcgacgggctgaggagcccgggcaacaccaacaacccggcgggctccgcggtgacggcggccaacgtggacaagttcccgggggtgaacacgctgggcgtctccatggcgcgcatcgactacgcgccgggcggccagaacccgccgcacacgcacccgcgcgccaccgagatcatcttcgtcctcgagggcacgctcgaggtcggcttcctcaccaccgccaacaggctcctcagcaagaccgtcgccacgggggacgtcttcgtcttcccccgcggcctcgtccacttccagcagaacagggggcacggccccgccgccgtcgtcgccgccttcaacagccagctccagggcacgcaggccatcgccatgacgctcttcggggccacgccgcccgtgcccaccgacatcctcgccaaggcattccgggtcggcagcggggaggtcgagcacatcaaggcaaacttcgcacccaag

SEQ ID NO: 757 - DNA, 615 bp, Zea mays
atggcaatggccaaggccagcatcctcgccaccttcgcggccgtggcagctctggcggcggtgcagctcgccgcggcggcggaccaccccgtgggaggcgacggctcctgggacgccagcggcaccaccggctacgacgcctggtccgccaagcagacgttcaagcagggcgacaccttgtcgttcaagttcgcgccgtcgcacgacgtgacggaggtgagcaaggccggctacgacgcctgctccggcagcaaccccgtgaagtcctacaccggcggcagcgcctccgtgaagctgtcggccccagggaagcgctacttcatctgcagcgtgcccggccactgcgccgcgggtatgaagctggaggtcaccgtcgccgccgccgcggtcaccgccgcgccggcccccgccaagacgaccaagccccggcaccagaggagcgtctccccgaccccggcccctgccgcggctccggctgcgccgtccaccgacgagatgcccaccgtgtcctcgcccaccgcggcgccggcgcccaagtcctctgacgcctccacgcttggagccaaggctgtcgtggggctcgccgtcgccacgatgctcaccttcttggccatg

SEQ ID NO: 758 - DNA, 486 bp, Zea mays
atggctcccatcgctgtcggcgacgccctccccgacggccagctcgggtggttcgacgagaacgaccagctgcagcaggtctccgtccacgcgctcgccgccggcaagaaggtcatcctcttcggcgtccccggcgccttcaccccgacctgcagcaaccagcatgtgccaggcttcatcacacaggctgagcagctcaaagccaagggtgtagacgagatcctgcttatcagcgttaacgaccccttcgtcatgaaggcgtgggcgaagacctaccccgagaacaagcacgtgaagttcctcgccgacggatctggagcgtacaccaaggcgctcgacctcgagctcgatctcacggacaaagggctgggcgtgcgctcgaagaggttcgctctcctggccgacgacctcacggtcaccgtcgcaaacatcgaggaaggcgggcagttcacgatctccggcgctgaggagatcctgaaggcgctt

SEQ ID NO: 759 - DNA, 699 bp, Zea mays
atgccgcgcccgcgccacggaaggcggaggccgagactggcggggacgaggacggttgtgctggtaaggcggcgccggcgaagaagcgggagcggagcagcgaggggaagcacccgacgtaccgcggcgtgcggatgcgggcgtggggcaagtgggtgtcagagatccgcgagccgcgcaagaagtcgcgcatatggctcggcacgttcccgaccgccgagatggccgcgcgcgcccacgacgccgccgcgctcgccatcaagggccgcgccacgcaactcaactttccggtcctcgccggcgtgctcccgcgcgccgcgtccgcggcgcccaaggacgtccaggccgccgccatgctggccgccgcgttcacgtcgccgtcgtcagcaccatcggagctcgacgccggcgcgccggcgccacgcgaagtgcccgccacaaagaacggctccccgtccgaggacgaggcaggcgctgaggcgccggtaccaccggcggcggcctctcagccagggacgccgtcgagcggcgtggacgaagagcggcagctgttcgacttgccggacctgctcctcgacgtccgggacgggttcgggcgcttcccgccgatgtgggccccgttccatgacgtgttggaggtcaatgcggaggaggagccgctgctttgggaatagcagtcttgcaattacaaagagggtc

SEQ ID NO: 760 - DNA, 255 bp, Zea mays
atgtcgggagcacagggcgcgcacccggtcggccagacgacgccgacgacgtacgagtcggtgggcggcggggagaaccgcacgcgcacggacctgcggtcgcgggaggaccagggcgccatccagatcgagaaggtgcaggacaaggtcgacgatgccgcggggcgtggggtagaccacagcaccttcggcgccaacaaggagggccgcgacgacaaggccgatgccggggcaaccggcaccggcacaggcgcg

SEQ ID NO: 761 - DNA, 402 bp, Zea mays
atggagataacatcaaagcctattgaattggatgaggtagacagagaaatcataaggcttgaaatggaaaagctctcattgaagaatgatacagataaggcctccaaagaacggctgagcaagcttgaagctgaactagaatctctcaagcagaagcagaaaagtctttcagaacattgggaatatgagaagtctttgatgactcgtataagatcaattaaagaagagactgacagagtgaacctggagattgaagctgctgagagagaatatgatttgaatcgtgctgctgaactgaagtatggaacacttttatcacttcagaaacagctggaagaggctgagaataaacttgttgaattccagccaatcagggaagtcaatgcttcgagaagaggtgac

SEQ ID NO: 762 - DNA, 840 bp, Zea mays
atggcaaacgcgccgaggatcctggccctcggcctgctagcgctcctgtgcgctgccgccggcccggccgccgcgcagaactgcggctgccagccaaacttctgctgcagcaagttcggctactgcggcacgaccgacgcctactgcggcgacgggtgccagtcgggcccgtgccgctcgggcggcggcggcggcggcggcggcggcggaggcggcggaggcagtggcggtgcgaacgtggctaatgtggtcaccgacgcgttcttcaacggcatcaagaaccaggccgggagcgggtgcgagggcaagaacttctacacccggagcgcgttcctgagcgccgtcaacgcgtacccgggcttcgcccatggcgggacggaggtggagggcaagcgcgagatcgccgccttcttcgcgcacgtcacgcacgagaccggacatttctgctacatcagcgagatcaacaagagcaacgcctactgcgacgcgagcaacaggcagtggccgtgcgcggcggggcagaagtactacgggcgcggcccgctgcagatctcgtggaactacaactacgggcccgccgggagggacatcggcttcaacgggctcgccgaccccaacagggtggcgcaggacgccgtgatcgcgttcaagacggcgctctggttctggatgaacaacgtgcaccgtgtgatgccgcagggcttcggcgccaccatcagggccatcaacggcgccctcgagtgcaacgggaacaaccccgcccagatgaacgcgcgcgtcggctactacaagcagtactgccagcagctccgcgtcgacccagggcccaacctcacttgc

SEQ ID NO: 763 - DNA, 195 bp, Zea mays
atggtcatcttgaacgcagaggaggccgatgtggatgcacttcaacatcaggtctcgtggagcaaggctgctcaaggatggatccatgatctccaccaatgtccccgtcgtccagtgctcccacaccagactaaggagatcggccgattcctcagagctataggagccaccatttcgccttccggtgacgatttc

SEQ ID NO: 764 - DNA, 486 bp, Zea mays
atggaggaaaggctacgagtggctgaacagaagcaggtacagatgatggggttcttggcaagagcaatgcggaacccagagttcttccagcagttggcccagcagcaagacaagaggaaggagctcgaggataccatctcaaagaaaagaaggcggcccattgacaacacaccattctacagtgatggggaaagcgaacagcttgattcacagttgaaaatgttcgagtcaggtgttctcaatgggctcaatgaacctgagctggagaatttagcagtgaacattcaggagcttgggaagggaagcatagatgatgggaacttgactcaagttagtgaccagtcagagctgaacgacgacttctgggcagagcttttggtcgaagattttggagacaaggcaggacagccagagttggagggaagaactgaagacgtgaatgaccttgctcaacaactggggtatctgagttcttctagcccaaaa

SEQ ID NO: 765 - DNA, 555 bp, Zea mays
atgcacacgcagatgcgtgcgtacgcacactgcatgcagccgggctctctgcctctacttggcagccgcgtcgagagtgaggaacgggcgctggccgttgacgttgcccggggggtcgtagctgcagacgatgaagacgccgcggttgtcggcgcagacgacgcgcgcgcagccgatgcgggtggacctgcgccacaccacctgcgtgtagtggccgcacaccttgccggggtcgcaggtgttgctgctcaggtggtagttcctcttctcgtccacccacgaccgcagcgcgtcggcggcgctccacgcccgccccgccgagccccagaagatgttctcgccgaacggcccgcccgagtgcaccagccggcagtccccggcgcgcttcgccgcgtagtcctgcgcgtacctggccaccctggcgtcccacgccaccgggcccacgccgtccgccgcgcgcgcgcggttgtgcagattcacgaagtcctgcggcgtgttctgcgccgaggcggtcgcggccatcatcgccgccgccatggccgcagcgagggcagc

SEQ ID NO: 766 - DNA, 456 bp, Zea mays
  misc_feature (52)..(52): n = any nucleotide
  misc_feature (59)..(60): n = any nucleotide
atggaggcgcgggactgcatcgagatgacgtggacccagtccgtcctctacntcgcgtnntacggcacgggaccagccgacggagcggctcctggacagggggaccaagccggagcggtacttcaagggcaagtcggactacgtgaccgagcccatgccgagccacgtgtgggagagcgcgtggagctggctgctcaaggacggcgccgggctcctgatcctggacccctacggcggcaggatgcgcggcgtcgcgccttcggcgacgccgttcccgcaccggcgggctctctacaacctccagtactacgggttctggttccagaacgggacgcgggcgacggagaagcatgtgggctggatcagggggctgcaccgggagatggagccgtacgtgagcaagaaccccaggggcgcctacgtgaactacagggacctggacctcggcgtcaacca

SEQ ID NO: 767 - DNA, 741 bp, Zea mays
atgacattttcccttgttctgttgtcagggcctctgtaccacaagggcatgtaccacatgttcttccagtacaacccgcacggcccgacgttcggcaccgggaagctctcctggggccactccgtctccggcgacctggtgaactgggcgttcctgggcaccgcgctggacccgacgtcgccgttcgacgccgagggctgctggtcgggctccgccaccacgctggcggacggccgccccgccatcctctacaccgggcgcgacgcaagcggcgtgcaggtgcagaacgtggcgttccccaagaacccgtcggacccgctgctccgggagtggcgcaagccgcccggctgcaacccggtggtcccgcagccgggcgacgtgacgggcaacaacttccgggaccccaccacggcgtggctggggcgcgacgggctgtggcggttcgccgtcgcggccgaggtcggcggcgtgggctccaccctggtgtaccgcagcaaggacttcgtgcgctgggagcggggctccgcgccgctgcacgcgtcccccgacgtgcccgtctgggagtgcccggacctgttcccggtggcggagcgcggcgcggaggggctcgacacgtcggcccgcggcggggccggggtgaggcacgtgctcaagctcagcaaggccgccgacgaggactactacgtggtcggccggtacgacgacgaggcggacacgttcgcgccggtggagggcggtttt

SEQ ID NO: 768 - DNA, 636 bp, Zea mays
atggagcagaaggttctcgtcgccgtgggcgtggccgtgctactcgtcgtcgtcctctccaagctcaagtctgtgctcgtcaccaagccgaagcttaacctgcccccagggccatggacgctaccattaataggtagcacccaccacctggtcaccagcccgtcgatctaccgggcgatgcgtgatctcgcgcaaaagtacgggccgctgatgatgctccggctgggcgaggtgcccacgttggtggtgtcgtcgccggaggccgcgcaggcgatcacgaagacgcacgacatcgcgttcgccgaccgtcacatgaacaccaccatcggcgtgctcaccttcaacggcaccgacctggtgttcggtccctacggcgagcggtggcggcagctccgcaagatctgcgtgctggagctgttcagcgtggcgcgcgtgcagtcgttccagcgcatccgcgaggaggaggtggcgcggttcatgcatagcctcgcggcgtccgccggcaccgtgaacctgtcgaagatgatctcgagattcatcaacgacaccttcgtgagggagtgcattggaagccggtgcaagtaccaggacaagtacctggacgccttcacaccgcggtccggcagacgtcggcgc

SEQ ID NO: 769 - DNA, 282 bp, Zea mays
atgaggttgtggtcgccgaacagcttcttgccgaaggggtggccgatgaggtggaacgcgtcggggcggacgttggcgaacacgcggtgggacagctccgagtcgcggatgaacaccacgaaccgccccaccaggaagtcggcggcgaggcccgcgccggaccgcttggcgcgcgccgcctgcgcgtcccagaaccccgtcgggtcgcggatcatgtgcgctacgctgccgaggaacggcaccacgagcgccggcccgggcaggggccccttcttccggtgg

SEQ ID NO: 770 - DNA, 711 bp, Zea mays
atggccacggtggagacctcgggcacggcgatagggtcctccgggagatgggcactacacggcaagacagccctcgtcaccggcggcacccgcggcatcgggcgtgcggtagtggaggagctggcggcgctgggggcggccgtgcacacatgctcccggaaggcggaggagctcggcgagcgcatcaaggagtgggaggccaggggattcagcgttaccgggtccgtctgcgacctctccgagagggaccagcgggagcggttgctccgcgaggttgccgaccgcttcggcggcaagctcaacatcctcgtaaacaatgtaggaacaaacataaggaaaccaactactgagtttactgcagaggaatactcgtttctgatggctactaatcttgaatctgcatatcacttgtgccaaattgcacatcctcttttgaaattatctgggtcaggcagcattatattcatatcatctgttgctggagcgataggaatctttagtggaactatatatgctatgactaaaggtgccattaaccagctaaccaagaatttatcttgtgaatgggctaaggacaacataagagccaactctgtcgctccgtggtacatcaccacttcacttacggaaggaattttggcaaataagaactctgaggaacaagttgggaattcaaacttcgccttggtacgggtccggagaaccctggaa

SEQ ID NO: 771 - DNA, 531 bp, Zea mays
atgtgtaccataccacatcacgctgtaggtttgggtcaacaaggccgggatcaagtgcgccatgcagacgttgccgatcgcgagcatccgcagcgcggcgctgtacgtgggcacggactggcgcctctacgcgggggcgcggcaggtgctgcccacgttgcgccgggtgcccgtccacttcgtcgacatcaccgcgctgtcggagctgcgcaaggacgcgcacacctcggtgcacacgctgcgccaggggaagctgctcaccccggagcagcaggccgaccccaagacctacgccgactgcatccactggtgcctcccgggcctgcccgacacctggaaccagttcctctacgcccgcatcgcatccagcccatggcccaacgacgcccaggcccagcagtagggaccctgcacctgctcctccttctatcttcctcattcgccgcgggccggcgcctcacgacacaaaagggaggcctgggctgcaacggcccgcccatcgacgagagctctggcgtttctgcttcaagc

SEQ ID NO: 772 - DNA, 375 bp, Zea mays
atgatacgcacggggcgtcccgcgctcgcgggagccgaggggcggcgccataccggcggccgggagcgccggggggtccggtcggggactatcggtcggagacagagtcggggacgacgcggcggtggtgggccgggcaagaacggtgcgaccagttcctcccgcagcggaggagtggggcggcgccgcgaagcggtggcccgcgtcatggagtccggggagcgcgccgaggccatagacgccgccatcgccggcgccggctacgacgagcagatcctgctgctgctgcgcatcgccttgttctgcaccaaggacgaccccaaggagcggcccactgccaaggacgtccgctgcatgctgtcgcagatcaagacc

SEQ ID NO: 773 - DNA, 516 bp, Zea mays
atggcggaggagcagtccaacccccagcaccagcaagcggaggagagggaggttatggtggagcagcagcagccgaggagggccccgaagctgaggtacctggacttcgtccaggtggcggctgcccaggccgcggtgtgcctcgctgggctctacggcctcgccaaggaccacgccggcccgctccgccccagcgttgacgccgtcgagtctgccgtcaagggcgtcgttagccccgtctacgaccgcttcggcggcctgccgctcgacgtcctcgccttcgtcgaccgcaaggtggacgacacggtgcacgaggtggacaagcacctcccgggcgcgctgaaggcggcgtcggcgcatgtctacgcggtggttcggggcgtgccggaggtggcacgcgagctgatggttctagcaaaatggtctatttactcgggaaatattttttatctatatatgttattttttttcccttctctttcttttatcttttgttttttattatttttagcgttt

SEQ ID NO: 774 - DNA, 654 bp, Zea mays
atggcgtttccgaagcctactagtctagccgcgctagctgccttcgctgtggcggccatggcggcggcggcgatgatggccgccaccgcctcggcgcagaacacgccgcaggacttcgtgaacctgcacaaccgcgcgcgcgcggcggacggcgtgggcccggtggcgtgggacgccagggtggccaggtacgcgcaggactacgcggcgaagcgcgccggggactgccggctggtgcactcgggcgggccgttcggcgagaacatcttctggggctcggcggggcgggcgtggagcgccgccgacgcgctgcggtcgtgggtggacgagaagaggaactaccacctgagcagcaacacctgcgaccccggcaaggtgtgcggccactacacgcaggtggtgtggcgcaggtccacccgcatcggctgcgcgcgcgtcgtctgcgccgccaaccgcggcgtcttcatcgtctgcagctacgaccccccgggcaacgtcaacggccagcgcccgttcctcaccctcgactgctgccaagtagaggcagagagccccgctgcatgcagtgcgcgcacgcatctgcgtgtgcatggcgtggctactcgatcgatcacgtactgcgtgggcgcgcgcaccataataagtattgtgtgg

SEQ ID NO: 775 - DNA, 795 bp, Zea mays
  misc_feature (698)..(698): n = any nucleotide
  misc_feature (721)..(721): n = any nucleotide
  misc_feature (770)..(770): n = any nucleotide
atggggaggggaaggattgagatcaagaggatcgagaacaacacgagccggcaggtcaccttctgcaagcgccgcaatgggctcctcaagaaggcgtacgagctctccgtcctctgcgacgccgaggtggcgctcgtcgtcttctccagccgcggacgcctctacgagtacgccaacaacagtgtgaaggctacgatcgagaggtacaagaaggcacacgccgttggctcttcctctggccccccactcttagagcacaatgcccagcaattctaccagcaagaatccgcaaaactgcgcaaccagatccaaatgctgcaaaacactaacaggcacttggttggtgactctgtgggaaacttgtcactcaaagagctgaagcagctggagagccgccttgagaaaggcatctctaagatcagggccaggaagagtgagctgttggctgccgagatcaattacatggccaaaagggagactgagcttcagaatgaccacatgaacctcaggaccaagattgaggagggagagcaacagctgcagcaggtgactgtggcccagtctgtcgcagcagcagcggccaccgacgtggagctgaatccgttcttggagatggataccaaatgcttcttccctggcggccccttcgcgacactggacatgaagtgcttcttccccggcagcttgcagatgctggnagcacagcagcgccagatgcttngcaccgagcctgacctccgctaccaactggcgccgcctgacactgacgntgccaacaataaccctcagcagttc

SEQ ID NO: 776 - DNA, 810 bp, Zea mays
atggccgccacctcctcctcctcctcctccacggtagttgcacttgcggcgcttctcttcttgctccttgtaacgtgtggctcgtgcgcgagaccggcgagctttaacgcctccgactttaccgccgaccccaactgggaggctgcccgggccacctggtacggtgcgcccaccggcgccggccctgatgacgacggtggtgcctgtggattcaagaacgtgaacctgccgccgttctcggcgatgacatcgtgcggcaacgagcccctcttcaaggacggcaagggctgcggctcctgctaccagatacgatgccaaaaccacccagcctgctccggcaatccggagacggtgatcatcaccgacatgaactactaccccgtggccaagtaccacttcgacctcagcggcacggcgttcggcgccatggccaagcccggccgcaccgacgagctccgccacgccggcatcatcgacatccagttcaagagggtgccctgcaactaccccgggcagaaggtgacgttccacatcgaggaggggtccaacccggtgtacctggcggtgctcgtcgagttcgaggacggcgacggcgacgtggtgcaggtggacctcatggaggccaactccgggtcgtggacgccgatgcgcgagtcgtgggggtccatctggcggctggactccggccaccgcctcgccgcgcccttctccctgcgcatcaccaacgagtccggcaagacgctggtggccaaccaggtcatcccggccaactgggttcccaacacctactaccgttccatcatccagtac

SEQ ID NO: 777 - DNA, 567 bp, Zea mays
atggccatcacccacgacgactacgtctccctgtgcctcatggcgctcgcagccgcgggaggaggagggcacgctgcggcagccagtgccaggacgacgacgacaatgacgacgcaagagtgcgagctccgcttccggtgctccgtctgcggcaaggccttcgcgtcgcaccaggcgctgggcgggcacaaggccagccaccggaagccgccgccgccgctcgcacaggcgccgtcgtcgtcgtcgtcggtgacgacgaatacctcgtcggcgggcggcagcggcgccgggcaggggaggcacaggtgctcggtgtgccaccggggcttcgccacggggcaggcgctcggcgggcacaagaggtgccattactgggacgggctctcggtgtcgctcaccgcgtcggcggcgtcggggtccgcgtcgagcttgaggggcttcgatctgaatttggtgccggccgccggcgcggcaaggtggcgagaggaggaagaggtgcagagccccttgccggtcaagaagcggcggctgtcctccggtccttccaccgaacttagtttaacgatt

SEQ ID NO: 778 - DNA, 459 bp, Zea mays
atgctggtcatcgaggcctaccgcacgctgcgcgaccgcgggccctacccggccgaccaggtcgtcaaggacctcgccggcgccttcgccttcgtcgtcttcgacagccgctccggcgccgtcttcgccgccctcggcgccgccgacgccgggggagcgccggtgccgctgtactggggcgtcgcggccgacgggtccgcggtgatcagcgacgaccgggacctggtcaagcgcggctgcggcaagtcctacgcgcccttccccgcgggctgcatgttccacagcgacggagggctcaagagcttcgagcaccccatgaacaggctcaaggccatgccgcgcgtcgacagcgagggcgccatgtgcggcgccaccttcaaggtcgacaccttcaccaagatcaactccatgccccgtgttggcagcgccgccaactgggccgcctgggacgaagccatc

SEQ ID NO: 779 - DNA, 414 bp, Zea mays
atgagctggatgctgcgccaccgcctcgccgccgcgtactcctccagcgccgccgtgacgacccgcccctcatcccgctcctggccgagcagggcgaaggccttgcccaggcaccgggccaggacgacgccgtcctcgagcgccgcgcacccgccctgcccgagctccggcgtcatggggtgcagcgcgtcgcccgccacgcacacgccgccgcggctgatgctgccgcggaccagcgccagcggggaccggaaccgcagcggcgacgacgccacgtcgctcatctcgctccgctccaccacctccagcgcctcggccgggaccttggcgccccgcagcttggcgaccacgtggctccgcatcttggccacgctctcctcggcgtcgccgtccgcgggggacgggtaccaggtg

SEQ ID NO: 780 - DNA, 63 bp, Artificial Sequence
  Primer
ggccagtgaattgtaatacgactcactatagggaggcggtttttttttttttttttttttttt

SEQ ID NO: 781 - DNA, 29 bp, Artificial Sequence
  Primer
cattttataataacgctgcggacatctac

SEQ ID NO: 782 - DNA, 27 bp, Artificial Sequence
  Primer
gctccgcccacataattcaaacaacac
